United States Patent Application Publication US 2026/0258423 A1 - sequence listing, part 10

SEQ ID NO: 167803 - DNA, 46709983 bp, Homo sapiens (residues 5,004,643-6,672,856 of 46,709,983)
  source 1..46709983: mol_type = genomic DNA
nnnnnnnnnnnnnnnnnnnnnnnnnnnnnnnnnnnnnnnnnnnnnnnnnnnnnnnnnnnnnnnnnnnnnnnnnnnnnnnnnnnnnnnnnnnnnnnnnnnnnnnnnnnnnnnnnnnnnnnnnnnnnnnnnnnnnnnnnnnnnnnnnnnnnnnnnnnnnnnnnnnnnnnnnnnnnnnnnnnnnnnnnnnnnnnnnnnnnnnnnnnnnnnnnnnnnnnnnnnnnnnnnnnnnnnnnnnnnnnnnnnnnnnnnnnnnnnnnnnnnnnnnnnnnnnnnnnnnnnnnnnnnnnnnnnnnnnnnnnnnnnnnnnnnnnnnnnnnnnnnnnnnnnnnnnnnnnnnnnnnnnnnnnnnnnnnnnnnnnnnnnnnnnnnnnnnnnnnnnnnnnnnnnnnnnnnnnnnnnnnnnnnnnnnnnnnnnnnnnnnnnnnnnnnnnnnnnnnnnnnnnnnnnnnnnnnnnnnnnnnnnnnnnnnnnnnnnnnnnnnnnnnnnnnnnnnnnnnnnnnnnnnnnnnnnnnnnnnnnnnnnnnnnnnnnnnnnnnnnnnnnnnnnnnnnnnnnnnnnnnnnnnnnnnnnnnnnnnnnnnnnnnnnnnnnnnnnnnnnnnnnnnnnnnnnnnnnnnnnnnnnnnnnnnnnnnnnnnnnnnnnnnnnnnnnnnnnnnnnnnnnnnnnnnnnnnnnnnnnnnnnnnnnnnnnnnnnnnnnnnnnnnnnnnnnnnnnnnnnnnnnnnnnnnnnnnnnnnnnnnnnnnnnnnnnnnnnnnnnnnnnnnnnnnnnnnnnnnnnnnnnnnnnnnnnnnnnnnnnnnnnnnnnnnnnnnnnnnnnnnnnnnnnnnnnnnnnnnnnnnnnnnnnnnnnnnnnnnnnnnnnnnnnnnnnnnnnnnnnnnnnnnnnnnnnnnnnnnnnnnnnnnnnnnnnnnnnnnnnnnnnnnnnnnnnnnnnnnnnnnnnnnnnnnnnnnnnnnnnnnnnnnnnnnnnnnnnnnnnnnnnnnnnnnnnnnnnnnnnnnnnnnnnnnnnnnnnnnnnnnnnnnnnnnnnnnnnnnnnnnnnnnnnnnnnnnnnnnnnnnnnnnnnnnnnnnnnnnnnnnnnnnnnnnnnnnnnnnnnnnnnnnnnnnnnnnnnnnnnnnnnnnnnnnnnnnnnnnnnnnnnnnnnnnnnnnnnnnnnnnnnnnnnnnnnnnnnnnnnnnnnnnnnnnnnnnnnnnnnnnnnnnnnnnnnnnnnnnnnnnnnnnnnnnnnnnnnnnnnnnnnnnnnnnnnnnnnnnnnnnnnnnnnnnnnnnnnnnnnnnnnnnnnnnnnnnnnnnnnnnnnnnnnnnnnnnnnnnnnnnnnnnnnnnnnnnnnnnnnnnnnnnnnnnnnnnnnnnnnnnnnnnnnnnnnnnnnnnnnnnnnnnnnnnnnnnnnnnnnnnnnnnnnnnnnnnnnnnnnnnnnnnnnnnnnnnnnnnnnnnnnnnnnnnnnnnnnnnnnnnnnnnnnnnnnnnnnnnnnnnnnnnnnnnnnnnnnnnnnnnnnnnnnnnnnnnnnnnnnnnnnnnnnnnnnnnnnnnnnnnnnnnnnnnnnnnnnnnnnnnnnnnnnnnnnnnnnnnnnnnnnnnnnnnnnnnnnnnnnnnnnnnnnnnnnnnnnnnnnnnnnnnnnnnnnnnnnnnnnnnnnnnnnnnnnnnnnnnnnnnnnnnnnnnnnnnnnnnnnnnnnnnnnnnnnnnnnnnnnnnnnnnnnnnnnnnnnnnnnnnnnnnnnnnnnnnnnnnnnnnnnnnnnnnnnnnnnnnnnnnnnnnnnnnnnnnnnnnnnnnnnnnnnnnnnnnnnnnnnnnnnnnnnnnnnnnnnnnnnnnnnnnnnnnnnnnnnnnnnnnnnnnnnnnnnnnnnnnnnnnnnnnnnnnnnnnnnnnnnnnnnnnnnnnnnnnnnnnnnnnnnnnnnnnnnnnnnnnnnnnnnnnnnnnnnnnnnnnnnnnnnnnnnnnnnnnnnnnnnnnnnnnnnnnnnnnnnnnnnnnnnnnnnnnnnnnnnnnnnnnnnnnnnnnnnnnnnnnnnnnnnnnnnnnnnnnnnnnnnnnnnnnnnnnnnnnnnnnnnnnnnnnnnnnnnnnnnnnnnnnnnnnnnnnnnnnnnnnnnnnnnnnnnnnnnnnnnnnnnnnnnnnnnnnnnnnnnnnnnnnnnnnnnnnnnnnnnnnnnnnnnnnnnnnnnnnnnnnnnnnnnnnnnnnnnnnnnnnnnnnnnnnnnnnnnnnnnnnnnnnnnnnnnnnnnnnnnnnnnnnnnnnnnnnnnnnnnnnnnnnnnnnnnnnnnnnnnnnnnnnnnnnnnnnnnnnnnnnnnnnnnnnnnnnnnnnnnnnnnnnnnnnnnnnnnnnnnnnnnnnnnnnnnnnnnnnnnnnnnnnnnnnnnnnnnnnnnnnnnnnnnnnnnnnnnnnnnnnnnnnnnnnnnnnnnnnnnnnnnnnnnnnnnnnnnnnnnnnnnnnnnnnnnnnnnnnnnnnnnnnnnnnnnnnnnnnnnnnnnnnnnnnnnnnnnnnnnnnnnnnnnnnnnnnnnnnnnnnnnnnnnnnnnnnnnnnnnnnnnnnnnnnnnnnnnnnnnnnnnnnnnnnnnnnnnnnnnnnnnnnnnnnnnnnnnnnnnnnnnnnnnnnnnnnnnnnnnnnnnnnnnnnnnnnnnnnnnnnnnnnnnnnnnnnnnnnnnnnnnnnnnnnnnnnnnnnnnnnnnnnnnnnnnnnnnnnnnnnnnnnnnnnnnnnnnnnnnnnnnnnnnnnnnnnnnnnnnnnnnnnnnnnnnnnnnnnnnnnnnnnnnnnnnnnnnnnnnnnnnnnnnnnnnnnnnnnnnnnnnnnnnnnnnnnnnnnnnnnnnnnnnnnnnnnnnnnnnnnnnnnnnnnnnnnnnnnnnnnnnnnnnnnnnnnnnnnnnnnnnnnnnnnnnnnnnnnnnnnnnnnnnnnnnnnnnnnnnnnnnnnnnnnnnnnnnnnnnnnnnnnnnnnnnnnnnnnnnnnnnnnnnnnnnnnnnnnnnnnnnnnnnnnnnnnnnnnnnnnnnnnnnnnnnnnnnnnnnnnnnnnnnnnnnnnnnnnnnnnnnnnnnnnnnnnnnnnnnnnnnnnnnnnnnnnnnnnnnnnnnnnnnnnnnnnnnnnnnnnnnnnnnnnnnnnnnnnnnnnnnnnnnnnnnnnnnnnnnnnnnnnnnnnnnnnnnnnnnnnnnnnnnnnnnnnnnnnnnnnnnnnnnnnnnnnnnnnnnnnnnnnnnnnnnnnnnnnnnnnnnnnnnnnnnnnnnnnnnnnnnnnnnnnnnnnnnnnnnnnnnnnnnnnnnnnnnnnnnnnnnnnnnnnnnnnnnnnnnnnnnnnnnnnnnnnnnnnnnnnnnnnnnnnnnnnnnnnnnnnnnnnnnnnnnnnnnnnnnnnnnnnnnnnnnnnnnnnnnnnnnnnnnnnnnnnnnnnnnnnnnnnnnnnnnnnnnnnnnnnnnnnnnnnnnnnnnnnnnnnnnnnnnnnnnnnnnnnnnnnnnnnnnnnnnnnnnnnnnnnnnnnnnnnnnnnnnnnnnnnnnnnnnnnnnnnnnnnnnnnnnnnnnnnnnnnnnnnnnnnnnnnnnnnnnnnnnnnnnnnnnnnnnnnnnnnnnnnnnnnnnnnnnnnnnnnnnnnnnnnnnnnnnnnnnnnnnnnnnnnnnnnnnnnnnnnnnnnnnnnnnnnnnnnnnnnnnnnnnnnnnnnnnnnnnnnnnnnnnnnnnnnnnnnnnnnnnnnnnnnnnnnnnnnnnnnnnnnnnnnnnnnnnnnnnnnnnnnnnnnnnnnnnnnnnnnnnnnnnnnnnnnnnnnnnnnnnnnnnnnnnnnnnnnnnnnnnnnnnnnnnnnnnnnnnnnnnnnnnnnnnnnnnnnnnnnnnnnnnnnnnnnnnnnnnnnnnnnnnnnnnnnnnnnnnnnnnnnnnnnnnnnnnnnnnnnnnnnnnnnnnnnnnnnnnnnnnnnnnnnnnnnnnnnnnnnnnnnnnnnnnnnnnnnnnnnnnnnnnnnnnnnnnnnnnnnnnnnnnnnnnnnnnnnnnnnnnnnnnnnnnnnnnnnnnnnnnnnnnnnnnnnnnnnnnnnnnnnnnnnnnnnnnnnnnnnnnnnnnnnnnnnnnnnnnnnnnnnnnnnnnnnnnnnnnnnnnnnnnnnnnnnnnnnnnnnnnnnnnnnnnnnnnnnnnnnnnnnnnnnnnnnnnnnnnnnnnnnnnnnnnnnnnnnnnnnnnnnnnnnnnnnnnnnnnnnnnnnnnnnnnnnnnnnnnnnnnnnnnnnnnnnnnnnnnnnnnnnnnnnnnnnnnnnnnnnnnnnnnnnnnnnnnnnnnnnnnnnnnnnnnnnnnnnnnnnnnnnnnnnnnnnnnnnnnnnnnnnnnnnnnnnnnnnnnnnnnnnnnnnnnnnnnnnnnnnnnnnnnnnnnnnnnnnnnnnnnnnnnnnnnnnnnnnnnnnnnnnnnnnnnnnnnnnnnnnnnnnnnnnnnnnnnnnnnnnnnnnnnnnnnnnnnnnnnnnnnnnnnnnnnnnnnnnnnnnnnnnnnnnnnnnnnnnnnnnnnnnnnnnnnnnnnnnnnnnnnnnnnnnnnnnnnnnnnnnnnnnnnnnnnnnnnnnnnnnnnnnnnnnnnnnnnnnnnnnnnnnnnnnnnnnnnnnnnnnnnnnnnnnnnnnnnnnnnnnnnnnnnnnnnnnnnnnnnnnnnnnnnnnnnnnnnnnnnnnnnnnnnnnnnnnnnnnnnnnnnnnnnnnnnnnnnnnnnnnnnnnnnnnnnnnnnnnnnnnnnnnnnnnnnnnnnnnnnnnnnnnnnnnnnnnnnnnnnnnnnnnnnnnnnnnnnnnnnnnnnnnnnnnnnnnnnnnnnnnnnnnnnnnnnnnnnnnnnnnnnnnnnnnnnnnnnnnnnnnnnnnnnnnnnnnnnnnnnnnnnnnnnnnnnnnnnnnnnnnnnnnnnnnnnnnnnnnnnnnnnnnnnnnnnnnnnnnnnnnnnnnnnnnnnnnnnnnnnnnnnnnnnnnnnnnnnnnnnnnnnnnnnnnnnnnnnnnnnnnnnnnnnnnnnnnnnnnnnnnnnnnnnnnnnnnnnnnnnnnnnnnnnnnnnnnnnnnnnnnnnnnnnnnnnnnnnnnnnnnnnnnnnnnnnnnnnnnnnnnnnnnnnnnnnnnnnnnnnnnnnnnnnnnnnnnnnnnnnnnnnnnnnnnnnnnnnnnnnnnnnnnnnnnnnnnnnnnnnnnnnnnnnnnnnnnnnnnnnnnnnnnnnnnnnnnnnnnnnnnnnnnnnnnnnnnnnnnnnnnnnnnnnnnnnnnnnnnnnnnnnnnnnnnnnnnnnnnnnnnnnnnnnnnnnnnnnnnnnnnnnnnnnnnnnnnnnnnnnnnnnnnnnnnnnnnnnnnnnnnnnnnnnnnnnnnnnnnnnnnnnnnnnnnnnnnnnnnnnnnnnnnnnnnngatccacccgccttggcctcctaaagtgctgggattacaggtgttagccaccacgtccagctgttaatttttatttaataagaatgacagagtgagggccatcactgttaatgaagccagtgttgctcacagcctccccttggtcactttttgtgactgaagggcatgtgttcaggcaagattgttgggtggctgtgttttgtcttcttccagctcggccatggaatagcctgtggggacctactctgtggtccccagggagctactctgtgggggctgtttctgttcagcagggaaggctctgcccttgctgttagctcctggagggctgcggacggcacctgctgtgttcacagatgacagttacttccctaggtagtctgcatgttgggcctcccaggactggttctctaagggcaatgtgaggacagacagaaaaaccaaattctgccaaagtttttaaataggtttattctgagccaataagagtgaccatggcctgggaaatacagtcttaagagatcccgaggaagtgcacctgaggcggtcagttacaatttggttttatgtatttatttatttttattttatttatttatttatttgtttttgagacggaggcttgctctgtcgcccaggctggagtgcagtggcgtgatctcggctcaccgcaagctccgcctcccgcgttcctgccattctcctgcctcagcctcccgagtagctgggactacaggcgcccgccaccatgcctggctaatttttttatatttttagtagagacggggtttcaccgtgttagccaggatggtctcaatctcctgacctcgtgatccgcccgcctctgcctcccaaagtgctgggattacaggcgtgagccaccactcccagcacaattggttttgtacatttcagggagatgcgaactgcaggtggaatcagaaaacagtacacgggccgggcgcggtggctcacgcctgtaatcccagcactttgagctgaggagttcaagaccagtttgagcaacttggtgaaaccccatctctaccaaaaatacaaaaaagttggctagtcatggtgatgtgcacctggggttgctcagggggctgaggcaggaggattgcttgagcccaggaggtagaggttgcagtgagccgagatctcgccattgcactacagcctgggtgacagagtgagaccccatctcaaaaaatcaatcaatcaataaatcaatacatagaagatgtgcattggatcagccccaaaaggcgagatatcttgaagcttacaggttataggtgggtttagggattctttagttggcagttggttgaaagagttgagctttgcctaaaaactgggagtcagtagaaaggaatgcttgagttaaaataaggaggtctgctgtctgtcatgtggtgccatggcagagtcacaatataccaggtcaaaaacacccattccacaagcttttgtggtttgtaaggcgtgattcccctacgctccttagaaaggaatttgagcaagaaaaaataaaggcagaattcagtccccaaatgcatggcacagagtcttcacctcagacccggagctttctcctctgggctccaggcaggcagcccctgaggctggtggtggctgtggatggctctgccctagtgggctccactcctcagcttgccctggcctgtgggccctgcgagctgagcagggtctgccctggggtcatctcgtgctgccgcacgcgaccttgcccactgctgctgcctctcagtgcccactcccctctgtcctgcaggtggaggagtggggacccttcgatcttgtgtacggcgccacacctcccctgggccacacctgtgaccgtcctcccagtgagtgatgcttcagttctggcagcctgtccccaccacccctgtctcctctcctctctcctcacacctccatgccagggcagaaactgcaaattgtcagcatttttcaaaaacagctttatcgaggcaccactgacatacagtaagttgcacgcattcagtgtgtccgactggatgagttctgagctagctccacacccatgcacccctcatcagagtaagagagcaacagagtaagagtccccatcactgcaggcttccctgtgcccccaagcctcccgctgaccccatgcagcccccagcgtgcccacatcactgcagctcacgtgtcctctggagcttcctctaaaaggcggtatttgtgccgcggcacgcgctctgcgtcagctcctccctcggggttgcctgtctgtctcttccccactctaggcctgcctgggggaggaggggtccatgcacctctgtggccccagcactgggcagggcttcattgctgctggagggacaggggcagggggatccctcagacccaggccggtgcgtcccctcgaccccctcagcccttctctcaagccccagtttccttaggcccctgcccagatgcacctgaacagcgtccccatgaccagcccccccggccccccctcagccctgccccctcaccccactccaggctggtacctgttccagttccaccggctcctgcagtacgcacggcccaagccaggcagccccaggcccttcttctggatgttcgtggacaatctggtgctgaacaaggaagacctggacgtcgcatctcgcttcctggaggtgcgtgcagggctgcgtgggccgccctctgacccctgcccacgtgagggaggggcttttctggtggagctcagtctacaccccaggctccgggcctggctccttgcggcccctggtttccaggtgtgtacagggcccaggagagctgctgtgcagtccgggcagggactgcggcctgggacacaaagccccttcaaggacagcatgggagggcagtcccacctcgcaccactcctgtgctcacagaacacggcctcgggggctcacctcctgcccctgccccctcagtctccacccacacacacgcacatcacaccacacacacaggtgcacacacactgcagtgcacagtcactgtacacatgcaccacacacagggacacacttgccacacacacacaggcacactacgtgcacacatactcacaccacacacatacagccttttcttcacacgtctgaatcctgattgtcagagcagccacttttggactcagcggatgggtcccctctggggctgatgggccgggtgttccagacacttccagggttggggagggacggccacacctcagccacaggagacaggcgtgaggctcaggagggggaatttcctcatgctctcaggttccatggaggggccacagccagcgggggcccgacccaccgagtgggcagcacctgtgggccagagcctttgctgggggtccaggtggcgttgaggttcctttggtgctggaatctcgtggagtggctggaatgcaaatccagctattcagaaggggagcaaacgccatgagctgaaaatcacaaagtctgtgcttttagaacaggagactttgtttctgtaaaggggcacagcctgcaaggtcccgtcccccaggctgggaagcacggggcctccaccaagaccagaggagccaggaggaggcacttcgaaggggaggggtggctggggcaggagctccgtgctgaccgggttggctaaacctgtgcggcaggttatggaggagcggtgaatattcatgaagggggtcctgctgcgtgcgtactgaacaaaatccgtggaacttacgacctctgttcactccggggtggagtcttatcatgtcagtgtgtcgcaatgaggccctaaacctcagaggtcttctcaggacacaggccctcaagcgcacaacctctgtaaaccggccggagccagtctgtggtcggggtcccttatcaggaggaggttcctgaagtcagtctcctgcccagtcagagctgtggtcatggctgtggaacgtggtcagttggcatctgcaggtggatgagctgcagtcatttgaaccttgctcatcctcatcgcggggccagtgcgtgtttagccgctgcagaaaaagcagcagctgtggcgtgagggcagagtccgtcctctcagtgtagggcacgcggctcggctcgacccttgcctggcgcggcctgaggtcctgtttgtaatttgatatcttattgccacagagtctgttctgtcagtttaaaataattcatcagcatttttctccaaaggtgattcataagaaaaaaggacgtagggaacacagtcgggctagaaagtccattgaccactcagggccattggcggctgaggccagtgggcctgtggggggcgcttaccgtccaggtcccctgacccacggccgaccctcccgcccccagatggagccagtcaccatcccagatgtccacggcggatccttgcagaatgctgtccgcgtgtggagcaacatcccagccataaggaggtatttcctgggcagctgaaagcgttcagggtcaaggggaacatggacccagaagcggggttcactgaggaaatggggtctgtctagcagagccaagcccagagcagcctctgcgccccagtgggactgcggtcggccttcggggccaccctgagaccctgaagacaccgaagcctgaggatgcccctttccccttggggagcttctccagcactggctctcagcttctcggggtccagcccctggacacccatatgcgccatggcggcctggccctgaatcggctgcagcccccaggctttcattccgtgtggcctccccacctcccttgcacacccacaagctcatgcgtgctcacactcagccacactcacatgactcacttgcacgctcatccatacgcctgtgtgctcatgtatgcacacacacacagtcattcccacggtcacgctcatccacacacctgtgtgctcatgcatgcacacacagtcatccccacagtcacgctcatccacacacccacatgctccctcagtcacatgctcacacaagcacactcacgactaccacctgcatccacacgttcacatgtgctcacaatcacacaggcacacacgcatcagtctcacccacccacacgcttgcaccccctgcggtgcactcctgggctgccctccccaccttttggggccttgaacacatggcctttccccacgtgccctctctgcggctaagcacccccttctgctgcccccacagcctctcccagctgcccccgcccctcaacagcctttccaggcggcccagacctcacgacctccagccaaccgcccatccatcccctcactcccacactcgcctggcgtgcctcgctcatacgtgcattcgtgtggaacgagcgctttctggctcagctgagtcatgatctcctcctgcctgagagtgagttctggaaacttactccctctcacctccccggttccagcatctcccacgtcaccaccgaggcacgatcctgttgcctggcacctgccaaggcatggcacctgcaggtcttgctggcctggcttcccctggatttgagtttgggtggggctgagccgaagcacttttccagcatgctttctcttcagaagccctctcacctgcatgccagccttcgcacagcctccccctaaccctaagcctgttccccgccatgtcacttcctgggaggccatgccaggctctgtggggctgggtgagcgggggtgaaggtgggggcagacccagcaacacctgtgtgcattacaggccatgcctcacctgctgcctggccccagaggctccttggcccccggaggctctatgcgtccacacagcagtgagaacagcgccccatcagggttcttaagtggcaggtgcagccagacccagggttgctgctccacaaaaggcacctccctctgctccagtggccacacttgtggcccctgcaggcttgggctgtgggctggcagctgcttcttcccagcccccctttctgagcgaggctccacagagctcctcacagggtttcgagggctggatccacctgagccgtgatcctggggtcacctggttcccagaaggaggctggcagttccttcccacaggtttccctcccaggctcctgggtgtctcaacagtgacatgagagacacccactcactgaaaggagaaatccttttgcagaggtagccaccatcacccccaggatggttaaggacagtccccactgccctagggagggtgcctgaggaggaggaggaggagggggacactgtatctggcacttcactcgcagtcttcaccccaaaataaactgagaaatgttcctggcctccagtggggtggctgggagcaggagagggggtgttggtgccaagtctgcaaagcccgtcttcctcaagggctcctcacagcaggctggcaggggacctttcctctcaccacctgccctcctgcacccagggctggggctcccggcacaggcagccccaggaacccaggggacggcctttgtgatagaattccctgggaatgctcgctgactctgcgagggtttggccaacttttgcccagagtcctgtcctttcctctgcgggggtgctgcccagggatggtgacatcctctagcgatggccctggagctcgctgttcacacggagtgacccccagcctgcttcccaggggaccagcccccggccgggggaggcgggaggcaagggagtcatctggtcccctgttgctcactccacctccatgagaaaaactcccagaatcaggcgggggttccggggggggggtcttaggcacctgggacaactgagaggcaggctgttcccctcgccccctcgcagcgattccttcccagccccatctccggggccacccagtgggcgctgcgcttgctcacaaccttccctcccctcctctcagcagcaggcactgggctctggtttcggaagaagaattgtccctgctggcccagaacaagcagagctcgaagctcgcggccaagtggcccaccaagctggtgaagaactgctttctccccctaagagaatatttcaagtatttttcaacagaactcacttcctctttataaatgagtcactatactgtgaagaaaaagacttttcctagaacaaaggcaactttcctcacgttgtctctttcctcttcggattcttgtttttttgcgtctccgtcgtcactgcagacccacgttccgttgggttctggagactcagggtctctcccccatcacgctggctcatgggacggggcgaggcccacgccgctgcacacaggaccacacgtggtggtgcgcgatgtacttcctgaaagcatttctgtgttctagttgagaagttcgagtatatttattataagatagttattggtcacgtctggtgttttatgtgtaggcacagccatctgtcaccctgcagggcagggggtggaggccagaagtgagcaggaggcgtcttcggagcgcctgcaccgtgtcccgcatgatgcactttctgccggggccttccccttgagaccgctgtttgcgttcatagagaaaccacgcaccctgattgtagctgcaccaaacagcctggacctttgcaaaagtacaggacctcagccttggcagacaaaggagggacctgctgaacagacggtgcggaggccaaggccagatccacacacaaaagtacaggacctcagccttggcaggcaaaggagggacttgctgaacagacggtgcggaggccaaggccagatccacgcacaaaggatgtcacttgtgggtcctaccccaggtggtattgcttgcaaaaagcagggctcctcctggccctctgcagtctgagtctcagtgaggataaacccagcagaaagctctgcctcaggctgtgctcgaatcacaggaaatgaatcttacaggggaactttggggtctgcactgggactattagtggtacgtaaaatgctttgtggaagaaaggttaaaattggaccctttgaaggttaaaaaggtgtatctggaagtagaatagaagccttcacttgagtgaacatgactgaacgcctctcccatcttgggacagtcctggatgcttacgacacacatctcacgtccagggatgaatttagcaagctctgtaatgaccccggggttcctgaagccacagagggagcacaggtgagggcatccaagtgcaaatgagccctctggggaggcctgcttgagctgacacataaatggggttgaagccattgtgagcccatgggcacgggccaggcagggtggtgagagctccagacagggcgggctgggctcaggctgtgtccacccagggaaccagtgtcatgggcccaacataactcgtggtcagtttctgtgagggctgcttcaaagcaggggcccaaggctctgttaggggctttctgccacccaaaatgcactttccttcttttgttctctccccaacactcagaactgtccacaccaccttgagattctctatgtattttattttaaatttttattttttgagacagggtctagctagtcccccaggctggagtgcagtggcacaaccatagctcactgcagcctccgtctcctgggctcaagagatcctccagcctcagcctctggagtagctgggactacaggtgcatgctaccatgcgctgctaatttttaaaaattatttgtagagatggggtcttgctctgttgcccaggctggtctcaaactcctgggctcaagtgatcctcccaccttggcctccctaagtgttggaattacaggtgtgagccactgtgcccgacctgccaagtatttgaattttatacacaggacctgtatcatgatcccatgctcagctgaaccaccctccaaaggatgcccatgtccccattcccggatcctgtgaatgttacctcatgtggcaaaggaaggactttgctgacgggattaaattgaggtggaaggcctccctggatcatccaggtgggttctacgtgtcatcccaaaggtcctcataagagaggggcaaagtgaggcttgaccacacagagaagccacatggccactgaggcggctgctggagctaagcacagggatgcctgggccacccagagctgggagaggcaggtaggatactcccctagcgcctccaccaggcaggcttccgctctccagggctgagagagaatagactgctgttgttttgagccagcaagcgtgaggtcgttagttccagcgcccacaggaaacgaacatacagtcatgcaccacataaccttcggtcaacaagcaatgccacagtgctcccatatcacagcgcggtatttttactgcacctgttctatgtttagatggctttagatacacaaataccagtgagtcacagctgcctacgctattcagcacagtcacctgccgcgtaggctcgtggccctggagcagcaggctgtgacacacagcctcggcgtgtagcaggctgtgccaccagggccagtgtgtgcactctgtgttcacacaaggacaaaatcacctaaggacgcatttctcagaaggaatgtatccttttcgttaaacaatgtatgactgttccccgaagagaaaagatcttccttggaccagaagttgagctctcagcatcagcggacgcccatgctgtcaaacgcaggttgctgtgccagaccccaaaaggacccgggcctggaggtgcatcaaggtggagatcagaagacccccacgccctcgaaacggcagagcagggcggcctggggctaggggcatcaggcagctgcttcctgcttaagcactacgactcgcacccagagcctcgaactccaggctgcacaaatacgattcctgcttggttcccagttggccctggacgctgccaaggggccctctctccacacccctagaacaaaagcctatcctgccggcccaagaaacagtcacggttgagggggaaaacgaaaaccttcctttgactacaggaaacttcccaaaggtttccctgtttcttcatctaaacccatctaagtgttgtgacacatgtgccggtgtgctgtgtgcgttcacttacaacagccccattcatgtatatgtcacacgtcaggggatgcaggcaccaaggggctaaggaactttctggggtcacacagctccggagttgggatctgaaccagccaccgcttaccgtggtctccgaggttcctgggctggtcctggcaccctcccccgcggccgcctcggcctgcctcagtgtccccttctggcccagctgccttcctgcccctgcctggctgtggcctccacgcggcgtcccctctctcgggggggcggggggggggctgcccgcagcacttggcttgctggggtctccggcgtctgcccgggaagcagagcctggacctgccccctcggccacagcacggcgggccctgcggtgtcggcccctctcccaccgcccccgggcggcactggggggctgcggggtccggacgcaccgacagggcaccttcccttcgccgccgcggatgaccggccgcgctcttgggaggccttaatttgggaggctctgctcccccaggacccattccccatcctcccaaagcccccacgcggtatccgggggccgtccccctctccgcagtcccgcgggtggaggggattcaggtgcgcccggccctgggggtggagcgctcggcccggcgtcagctcatcggcgcggcgcagccccggacctcagccgcaggcccagaggcgcgcggttcccggccggtcaatcagggagggcctccgggaggaggtggcgctgcccgcagcccgcccggctcacctgcgccctcctcacctgcgccctcctcacctgcggggccatgcggtcccttaccagcagccgcccgccccggggcgaggaacctcagcccccaacatcgccacccctccagcctcgccggtcctagccggcgtccctgggcgtgtcccgggaagcgcacgtccacgctggcgctggaccgggttttctgactccagggacgggactcgtcctaaagagtccggctcagatgcggttacgcgcctcacctcacccgggtgcggaccgccagtgcctccgccctgcactccgcgggccctgcccagctcttcccgccggagggcaggtggcccccgccccgcccctgccaggcgcgcgattttaaatccccccaacccccgtctctcagcgtggcctgggagggggaagccgcccggcttcagggcttcctgcgccttcgccgccgccctccctgcccttccccgccgccgtcccccctatccccccagcccgtctcttccgccttcttattttgtgcctgggctctctgctccgcaaaaatgttgacttcccacgggcagaggtttcagaatttttttaaagcttttgtccacggcgttctctacatcttggttgaaggaatggcagcctgcggggtgccgtctggggcccccgtctccctgcgcttctcgcctcctccatgcgcaggaggcggtggggatccgagcctcagcccagaggcgggggctccgggaggagggtgccccgctgccctgtctagcagcctcacccaggcccttccggaggtgcctctgcagaaagggagtcacgtcccccctgggcctcacctggcttgcagggatcagggagggagggcggggtgggctgggtgcggtggggaaggagcagggactctgggtcccaccctcggttgcgtggtgcagcctttcccaaaccagctgccccagactccaggccagacgccactgccaaggctgacgagcccagagccgcaagcctgcctcggtttctcggcgggggatcctcagagccagtgttaagcaaagaggctgcgccagcgcccttcacacccctagaaggctaggggagcaaggctaggtgggggcgggctggggctggcccagagggtagagcccgcccactttccctccctccttccattcatgcatgcgttcattcagtcattcattcctcagcagtcgctgagctcactcgccttaagtcctggagatcatcggagcgcagccggccaggggcctggcgctctcccagccttggggcctgggtccccggactcctgctcggggagggccgcaggaccggcgcattgtgcgcggcgcggggaacggcccttgcctcccacggtgccctccctcgctgcgccggcacccgcagcacccctggccaccttcctgccgggtaccccccacccctgcgcttcccagggcacctacggcgcccaggtccgcgtccaggcggacaggccgacctgcctctgtcccgcctccggccgacgggcacacgcctgggcagagccgaactttccggagccgccgcgcagcgccccgcctcctgtcccggggcggtctcggtcgccagaggagccaggccgggggcggggcggggacggggcggggacacggctgcctccagcacaccgcgcgctgggcgctcagagcctcgggcgcggcgggagcgcagttagagccgatctcccgcgccccgaggttgctcctctccgaggtctcccgcggcccaagttctccgcgccccgaggtctccgcgccccgaggtctccgcggcccgaggtctccgcccgcaccatgcggctgggcaggtgagccggggaaggagcggaggcgccgcggtcaggggcggggtggctcggcccgcgcgtccccagctcggctcggacgcggggcctgcggggctcgcctggaggtgccgggctggcagtgcgggtccgaggagcgggcggcggaggcgccggggcggccggcggggcgtggacggcagtgggcggcggggcctggcaccgggacccatggcaggacgcacagccgtgcgggggcgggctcgggggcggggtccctgccagggaaggaggaccgcgaacgctggaaggagggagggaaggcgggcgcaccctgcacgccggggcacgggcgctgccccttccactccctggcactgctgatttcctagaagaagggagaaggagggaggtgaccggccgagcgctctccaaggccagctggtgcccacggtctgcggacacgccctcccccacacacgtgggattccccgcagcccggcagccgatccacactggggaaggcggggctgcctgaaccaggagtgacagcttcctcctggatttttgcgaaaatatccaaaatatactcttcgcaacccacgttgtagggtccgcagcctgtgctcccctgggtgaacctgtgaggcccctgaccccagggatgcctcccgcacagctcagagctgggccacaccggagtcacactccccaggtcccctccccattagaagtgtatgcagttatgatcctgccctagagagaaagaatttaaaggtcccggaatgtcatagccctcccaaatgtcttagccctccgccacccacaccttcaggtaggcggccctgtccatgctgggtcttgaggcaagctcggggtgggggtaggttagatgcaggggtgctgagggtccaaggaaaggacacagaggccgctgcttaggcagcacccagggaggggacaagccagaaacagcctggagcaggcaccccccaccctggcccaggaagcccccagatgtcctgaggaggcctccatagacaggaggggccttgtgggctggtgatgaatatgggcactgtgggagacaaatgggggcacagaggagttctcacagctgtcgtttagatggtggctctggggaaatgcttgaaggggctaagggtggaggcagggggcctgctggaggccatcacagccatcttgccagccagaatggtggccccaacagggggagtgggagagagaggaagggccgcctgcagacttcaagagcccctggtggccaggggccgccttggtgcatgtgtgctcacttggcacagacacacctccatgcagactcagatgacagccatcgtgggtggggcaggggtttctgtggctccagggctcagggacagcccactgggaggttcccacaagaccaacctttgacttacaaagcccccaagctttcccaggcagaggccacagagaagagggatgagcgtctcccagaccttggaggtgcagggacatcagagaaggagatgtccctgctcctggggctcttgcttcatggggagctggccccagaaactgatggtttggggggctggggtaagcactgctaccaaagtggtcccggccactaagggcccccacgtggggaaggcatcctgggggctggcgggaggaggtggcgagcctgtggcgtgcagggtgcaaaggctcccagacccaagatggcaggggcattggagtcacgaggggaatttgctgcccgaggcaggggcaccagctgcagcaggatctgaaacaggaggagctcaggtttggtttcaaaatgatccgcgttccgcacagggctgtcccgtcactcacctgaccctgtcacgggcacgcctgatgttctccgtctccccagcattttaagtgacactcctactatatgtgccctgaaagcttttttttttttttttttttctgatttcctacaacttcttggcatctgtccccaggaaggctagaccagcctcactggcgtccctcgctccccttcatcctcacgccagcatcactgtgtttctggggatttgttaccgcgagagctagagagtggtgagaggctgccagcccctcggacttgctgtgctgggcaggagggtggtggtcctggccccggaccccgaattcccatggagaacagaggcaggcaggctcctggctctgccttcacatttctgtgatgggcttaactacctcctgctcatgggaaccagcctgttcctgtttggaagatacaggtaactccctggtggccccgcctcacctgcctttctggttgttttttccagtcctggactgctcttcctgctcttcagcagccttcgagctggtaagttcagggggtgctttgccatggggcgcccagctcagagatgggctctccggctgtgtggactgctggccgcagggcactgggagcagcctcaccaggctccttcttgcttctcaagtggtcctttggagacagttggaccctaaacctaggttgctgcacaggatagaagcgtttccttaaagggaaacacttctgcaaactccggagttcttgtttgactccgtctttgttgcgggcagaatgcagttcctctgagccagggcttcctgggtcccctggtctccctgtcccaggcagcagccctgctgagccctaagagccaccagcctctggaagagccaggaataaggacgaagcaccgcagcacaaacctgaaaccttgccaagccttccagcccagagggctttgggggcaggggacacacacagattttcctgcaggtgccaggtgcagtggctcactcctgtaatcccaggactttgggaggccaaggcgggtggatcacctgaggtcaggagttcgagaccaggctggccaacatagtgaagcccgatctctactaaaaatacaaaaaattagctgggcatggtggcgggcacctgtaatcccagctacttgggagggtgaggcaggagaatggcgtgaaccccagagtcgggggttgcagtgagctgagatcacgccattgcaccccagcctgggtgacggagcaagactccatctcaaaaaaaaagattttcccacaggcatttacgtagctgcacaaacagtaaagctaccctgtgtctgccacatttgtgacagctttcctactgcaagtgagcagcaatataatgtaattgctgagaaattcttttcccttaaatgcctttcccttaaagaactttttattgtgcattaattatagactcccgagaagtagtaaaagtagtgctgagtaacaaaaataacactgagcggccaggccccatccagccgctcctccccatggcagccccttacataacaggagtgtgtcatcgaagccaaagactgacatggacctcaccatgaaatgtctgcgtttttcaagtttgactgcattcctacatgtgccttgttaataaattctgagccaccgttggtgtttgaggcttgaaacccaaagtctgccccatagagtagcttcatggcctgggcatcagcctccgaaaacagattttgcaccttttgggccattgcagatactcaggagaaggaagtcagagcgatggtaggcagcgacgtggagctcagctgcgcttgccctgaaggaagccgttttgatttaaatgatgtttacgtatattggcaaaccagtgagtcgaaaaccgtggtgacctaccacatcccacagaacagctccttggaaaacgtggacagccgctaccggaaccgagccctgatgtcaccggccggcatgctgcggggcgacttctccctgcgcttgttcaacgtcaccccccaggacgagcagaagtttcactgcctggtgttgagccaatccctgggattccaggaggttttgagcgttgaggttacactgcatgtggcaggtaggaccatcgaggcggggagagctaggtccatcccagcctcacatcgtggacaagtgttcatgaaaccccctccctggctcattcactgtttcttccagtgaagaaaattctcatctgtgttatcaggcttctgtctaacttcgagggaaactaaacagctgaaaaatccttagtgcatgacctgcggctgcttggtttcccggaagagctcctacccttgctgtctttgcctcttgagttagttagcttttgtttttgtttttgttttttgagacggagtctcgctctgtcacccaggctgcagtgcagtggcacaatcttggctcaccgcaacccccgcctcctgggttcaagcaattctccacagcctcccgagtagctgggactacaggcgcgtgccaccacacccagctaatttttgtatttttagtagagacagggtttcaccatgttggccaggctggtctcaaattcctggcctcgtgatccgcccgcctcagcctcccaaagtgctgggattacaggtgtgagccaccgcgcctggccaattagtttgttttttgagacagggtctcactgttgcccaggctggagtgcagtagcgtgatcacgctgcagccttgacctcctgagctcaagcaattctcctgcttcagcctcctgagtatctgggactacaggcacatgccacctcgcctggctaattttgattatttgtagaaatggggtctcactatgttgcccaggctggtctcaaactcctggacacaagcgatcctcctgcctcaccctcccaaagtgctgtgattacaggcgtgagccaccacatccaaactagagttttaaaagtgaaatttgaagggaactctataaagcactaaatgagaacaaaatttaagagaaaaataagaggcaaccaaggagctctgggcagttcattggggagaacagctgtgtccatttcagatggactgtgagcccctgtgtcagcagtgagaatgaccagatccaaatgagggggtcccggcacagccgacggctgtggagtggggggtctgtgggtgccagtcactgcccgacaggctcagcggtccctggctactgggactggcttgggggatgactcttgggcaggacagggcggagcctgctgctcggaccacagccctggtcctggcctgtcacccatgtcggggcacaatgggccgcctcccctctgacccagccttggcaccgtgtaccctctgtttcttgaccagcagggtctggcatctctcacaatctgtttccctcccctgcagcaaacttcagcgtgcccgtcgtcagcgccccccacagcccctcccaggatgagctcaccttcacgtgtacatccataaacggctaccccaggcccaacgtgtactggatcaataagacggacaacagcctgctggaccaggctctgcagaatgacaccgtcttcttgaacatgcggggcttgtatgacgtggtcagcgtgctgaggatcgcacggacccccagcgtgaacattggctgctgcatagagaacgtgcttctgcagcagaacctgactgtcggcagccagacaggtaaggtcccggcgcctgcgtgctgagctgtgcccgacagtggggccagggctggcttgggagagcctctgaggtaggagacaaaaagtcccttcgacgcggctcagcacccgaaaggtggttggaagggaggggaggtgagaggcacatgccgcacagtgagaaccaccgcggtctctgggaacaggaatgggtgccgtgcccagtgcatattgctccattttcttcacctggagtcggttttcttaaacctactttacagatgagggctgaactctgaggctgggtaacacttcagaagccgcagcactaggcagcagcagcccagaacagaagcccacagctgtgcagcccccacccaagctccctgcctcttgggcgtgtgtcccctgagaagactgaagcccccagacacgggaatcccactgcgcacggctgctggcccagcccctccctgtggaaggggtgccctgtggaaggggttcctctacggggactcctttgtagaggacacaggccctccccatttgtgtccccatctcctgtgtcaggatgagaggcagaagatggaggcaggagatgatcgaggaggggtcctggggccctgctggctgcaggaaaggggctgccagcaggactcaccgtgtggccctgggcaaagcaagaatgcagggctccttgtttcgggagcattaagaattccagacagtgaccacaagcattgcacctcctgccggcctttctgagctcaaccccagaagcctgcacaggtcataccctcgaagtccaccctggccgccaggatccccggcagagccggaccttctccttcttgaaatcagggctcagcccttctgactcaacattcagagtgtctgagctgcatgcagcgggatgaggggctgctcccaaagcagcctctgataactgccttccagccagcatactccccgcagagcagcccaggtggcagcagaagcttctcccagggctgtcgtctcaaccccggccacacagtggggtcatctgggcagcctatgaaagcccccatgcccagacccattgcacctgaagctctgggctggcacctggcatcgggacagtgtctaaaagcttcagaggttcaaggttgagcaccgtccaggtggtttctccaagtgtgtttggagacgcgccgggcattcagaacaagctcccagggggatgccgctgcttgtttgccggtgaggacggctctctgaagggcactgcacacagagaccagaggcattgttagctttgtgcatcgtggcggaaaagcagaagggcgcagctgccatggggaacgttgtggcagttcctcgaaaagctcagcgtggaagcactgcaggacccagcagttctctcctagcgatataggccagaggattcagaacagggactcaaacaaatgcctgtccgtgaatgttcatggcagccagaaggtaggaaccacccgagtgttcctcgtgggtggacggatgcaccaaacgtgatccatgcgtgcaggggagaattagcctgaaaaaggaaggaggccgctgtcctgacgcacgctgcggcgtggagaacctcaaggccattatgcgagtgacagagccagacacctgaggacaagcctgtgggactctgtttatgcaaagtgtccagaatagggtgagccactgagacacaaagcaactggaggcttctggtgcaggaggacagcaattctcctgcctcagcctcctgagtatctgggactacaggcacatgcacctcgcctggctaattttgattatttgtagcgatggggcctcactgtgttgcccaggctagattcaagctcctggacacaagcgatgctcctgcctaagcctcccaaagtgctgagattacaggtgtgagccaccacgtccaagctagagttttaaaagtgaaatttgaagggagtgccatgaagcactaaatgagaacaaaatttaagagaaaaattagaggccccagctgttctgagaccccctcatttggatctgctccttcttgctgctgacacgggctcacagtccatctgaaatggacacgaccattctccccgatgaactgcccagaaagacagcagacggcagggaagagtggggagtgactgctcatggacacaaggttcccttttgggggttacaggtcctggaattaggtggtggttatgatggcactggcaccctgaattgttcactttaaaatggttcattttgggccgggaggggtggctcacacctgatcctagcacttcgggaggctgaggtgggtggatcatctgaggtcaggaatttgagaccagcctagacaacatggcgaaaccccttctctactaaacatacaaaaattagccaggtgtggtggcatgtgcctgtaatcccagctacccgggaggctgaggcaggagaattgctggaacctgggaggcggaggctgcagtgagccgagaccgcaccactacactccagagtgggtgacagaggaagactgtgtctcaaaaaagtaaataaataaataaagcataaagtggctcattttggctgggcaaggtggtgcacacctatagttgcagctacttaggaggctgaggcaagaggatcacttaagccctaagaccaaccagagcaatatagtgagatctcatctctaccaaaaaaaaaattagccaggcctggtggtgcacgcctgcagtcccggctacttgggaggccgaggtgggagaactgattgagcccaggaggtcgaggctgcggtgacctatgatcacaccgctgcacttcagcctgggcaacacagcaagaccctgtctcaaaagctcaataaataaaatgaaatggttaattttatgttatgtggctttcaccttttttttttttttttttttttgagacggaatttcactcttgttgcccaggctggagtacaatggcgcgatctcggctcaccgcaacctctgcctcccgggttcaagcaattctgcctcagcctcccgagtagctgggattacaggcatgcaccaccacacctggctaattttgtatttttagtagagacaaggtttctgcatgttggccaggtgtgtctcaaattcccaaccccaggtgatccacccgccttggcctctcaaagtgctgggattacaggcgtgagccaccgtgcctgacctcactttgatttttaaaaatccagtaagggccggacgcggtgactcatgcctgtaatcccagcattttgggaggccgaggtgggtggatcacaaggtcaggagatcgagaccatcctggataacatggtgaaactccgtctctactaaaaaaatacaaaaaattagctaggcatggtggtgggcacctgtagtcccagctactcgggaggctgaggcaggagaatggcgtgaacccaggaggcagagcttgcagtgagccaagatcacgccactgcactccagcgtgggcaacagagcaagactctgcctcaaaaaaaaagaaaaaaaaaatccagtaagaacctgtgcttcccaccatacccagccctatggtcccctggctgtggttggggttatcgcccctcccaggtaggacgaggaggaacaagatccctgcaggaaatgaagcccctctgcaagagaaaaccctcatctcatcagtttggtgtttttaaaacctcaaaatcatgtcagggaagttctctggaataaatacttccctgcaacactttctactcaaggatgaaaaaaaagacccttttcctctaagatcctttaagtcgggttattttcctctttcttgtaggaaatgacatcggagagagagacaagatcacagagaatccagtcagtaccggcgagaaaaacgcggccacgtggagcatcctggctgtcctgtgcctgcttgtggtcgtggcggtggccataggctgggtgtgcagggaccgatgcctccaacacagctatgcaggtagagacggccccatattgtggatgttagtgtttgtcctgttggtgtgaatgtttgcctgctttaacttccctcactgatactgatttagcttgaaactttattgtggtaggctgggcacggtggctcacgcctgtaatcccagcactttgggaggccgaggcgagtggatcacgagatcaggagatcgagaccatcctggctaacacggtgaaaccccgtctctactaaaaatacaaaaaattagccgggcgtgtggcaggcgcctgtagtcccagctactcatgaggctgaggcaggagaatggcgtgaacccgggaggcggggcttgcagtgagccgagatcacgccactacactccaccctgggcgacagagcaagactctgtcccccccaaaaaaacaaaggaactttgttgtggtagcactaatattcatgaggcttagcaacccgaactatcccacaaagtggttttgaaacccagcatctctgacattcctgacactgccaagccagaagggcgctgcgaggtctgccctgcaggtcgggtgggcagggtggcttctgcatgtagaggccggggtggtggtcatttccagggaagccgctgaggctgccttgagcactcctgccctgtgggtctgtgactctggccagctccgcgacagagcccggaggtctgtgtttcagccatgtaagacacagcagcaggacgcagtggcgcaggaagccctgaacgttggctgcagtgatggtcctgatgacggggggggctcttcccagaaccccccaagggtggcagtcaatggagtgcaggcgcagtggccacggagtaggggcggctcctgtgggctgcccctggctttcccatttgtggccaatctcagtcatcccagaaacatcttccacggccatgatgccactgctggctgggccgcagaagggccccagatccaggtcacagcattttaagtgcttcccaggcacgtacccctttaagaggatctttctcaaaagccacgtggcctggggagcccctcatctgtgagtgttttccccgcctggagctgggagcctcggggagacttccaagtagggtgtttagggggctgctgagagctcaggaacaccaggggctttagggacaccccccgtcgctgctgccctgaccattttggtttgtcctccaggtgcctgggctgtgagtccggagacagagctcactggtgagtttgccgtgggaagcagcaggttctggggggcccaggggaggcttggctgccagctgtctttcagagtttcaaaaaactttcagaaggcagaagtcccttgccttgaacaactgttgttcctggagacgcagcgaagccctcgatggtgcgcacggcatttcctgcagcctccccttggcatgggatggcatcctggtgtgcactttgtcacactgcgatgggattttcccaacatgcacagaagcagagagacgagtgctagactcccgcgctccccagtgcccagccccgaccagggtgtccagggcgggtccaggcaccggcgcccagcccccatggggtgtccggagtgggtccaggcaccggcgcccagcccccgtggggtgtccagggcgggtccaggcaccggcgcccagcccccgtggggtgtccagggcgggtccaggcaccggcgcccagcccccatggggtgtccggagtgggtccaggcaccggcgcccagcccccgtggggtgtgcagggcgggtccaggcaccggcgcccagcccctgtggggtgtccggagcgggtccgggcaccgccagcttctctctgtggcagccactcctgcagctctcgtttgcccctcagttccaggagcaacatagatgtggattcctgtccaatttgggaaaaatgtccacacacggtcacccacctggcaggtgcctctggctgcaaggggcgctgggcttcgcaggcaggccagccgggctccccgccatgggccaggatcccctccgagccctgtttgccgcccaggagaaggggttccccggggacagtgggctcagggtgtgcgcagccaccacgctgtggtgtcacctgtggacccaggcgagctgatggccgaccgcagaaacgcacttccaaggccaggtcggcccatccagatgatgcaggaacacagcttgctaaaaacacggccggcctgttcccgtcggagccagtcgaagttccctgaacaggccgctgtttccgaagctttaaaccctgtgtttccaccaagctgagtcctgagaaaaccggcgtctgcctgcagaagggaaaggggtgcttcatgttcctctctctccttcatctcccttccaaggccacgtttgaccggagctcaccgcccagagcgtggacagggcttccgtgagacgccaccgtgagaggccaggtggcagcttgagcatggactcccagactgcaggggagcacttggggcagcccccagaaggaccactgctggatcccagggagaacctgctggcgttggctgtgatcctggaatgaggccctttcaaaagcgtcatccacaccaaaggcaaatgtccccaagtgagtgggctccccgctgtcactgccagtcacccacaggaagggactggtgatgggctgtctctacccggagcgtgcgggattcagcaccaggctcttcccagtaccccagacccactgtgggtcttcccgtgggatgcgggatcctgagaccgaagggtgtttggtttaaaaagaagactgggcgtccgctcttccaggacggcctctgtgctgctggggtcacgcgaggctgtttgcaggggacacggtcacaggagctcttctgccctgaacgctcccaacctgcctcccgcccggaagccacaggacccactcatgtgtgtgcccacaagtgtagttagccgtccacaccgaggagcccccggaagtccccactgggcttcagtgtcctctgccacattccctgggaggaacaatgtccctcggctgttccggtgaaaagttgagccacctttggaagacgcacgggtggagtttgccagaagaaaggctgtgccagggccgtgtttggctacaggggctgccggggctcttggctctgcagcgagaaagacacagcccagcagggctggagacgcccatgtccagcaggcgcaggcctggcaacacggtccccagagtcctgagcagcagttaggtgcatggagagggtatcacctggtggccacagtcccccttctcacctcagcaatgatccccaaagtgagaggtggctcccccggcccccaccaccctcagcagccccaccccactcaaccctgagggtccccagggtcctgatgaagacctccgaccccagcgccaggctcctcggagcccaacagtcccaagggggcagtgctgaggggtacagccctgggccctgaccagccccggcacctgccatgctggttcccggaatgaatcagctgctgactgtctccagaagggctggaaaggatgctgccaggtgacccgaggtgcactcgccccagggagatggagtagacagcctggcctggccctcgggacacattgtctgccccggggctatgggcaaatgcccctccttcttacttcccagaatcccctgacattcccagggtcagccaggacctgttacagccctggtcacttggaactgacagctgtgtgaggcctgcacttctcagacccagacttagaacaaaaggaggagtgaggactcaaggctacaatgaggttccagtacttgttacaagaaattggttttctgcaaaaaaagtccctacctgggcctttaggtgaatgtgggatccactcccgcttttaacatgaaagcattagaagatgtgtggtgtttataaaagaacagttgtcatcaccgggcattgattggcagggacaaggagctgcttgggtgtggaaagttggggcgttggaaagtgggctgtggtgcccatttgcagtgactgtgaagtgactccaggacggacctgcgggggcacccagagatcctaagccccaggactgagggtcgtgcatcaccactcgggtgtcccgggaggtgccctgggcccggggacctcacaggcaggacggcgacactaatgcagggagagggagtctggccccagcttttcctatcagaggcgattttccttcaccaggggatgggcaggaaagaggcaggggccccagaagcttctgtccctcatgcctgagggcacgggggacacttggaggctgctgtcaccactgtgcgtccaaggccatgctctctgcgggtcagtgcctgagtctcgcctccctgctggtccctgaagccccctcagaagccctgcctgtcacgtcggcatttgtgagacctaccctgtaacgcctgcccctctcagcccaacatcagcttcctctttctcccttgctgtagacaggctggattccagtgttgggacagccatctccagaaacctgacttaagagagtaagatgcaaatcgtgcctgtatccagtggcttcggtgggtgcagggagtcttgggcacagccagctcagctgtctgtggtatgagcaggaacaggtgccactcctgctcaggggaccctgccctacaccaggctgttccgtccccctggaggacatggggccaggtctggaggcattttgggttgtcacagctgggggctgttcctcggcttcagcgggtggaagcctcagatgctgttcaacatcttctggacacgggaggccccgacagagagaagcgtccacccgcaagtccacagtctgaggtctcccctcagagaccctgccctgcacacccacctccagccaaaggtcctgcctgccccagggctcaggggaaccttgccggtctgtggaacaggagaggggactctcgccagctgcaccaccctgcacgtagtaggtgtgcggtaaacatccaccagggaggctccattcaaggctggcagatggggcggtccatccctagggcaggtgacagaagggaaaaggctgcctgctggcccccgagccaggtagcacatgcttgtgcctcagtttcccctcctgtaaagtgaggcgctggatccaggttctgtctactgggctctgcagcttggacgctcctaagaccaagcgacccaccctggggagggcagctatggctttggaatagctgtccaggcccgggtgcctccaagacggccaccacaccctgcctgtgctgcaggggtgcaggggtaaggggcaagactccagaggcctcctctctgcatctccttgtcttcagtggccggaggtgaggcctgagctcaggggaggggcttctgccacgaaccctatggcggggcacagcacacttttcccagggaggacccctgggccccctgcattatccccagcggagtgtggggtcaccttccaagagcgacattgagaagctccagctctaggagtgtgcagactcttaaccaggcaggcccaggccctggggcacacaaaggcggggcctgctctccccagctgcccctgccaatgggggctggactgtcctaccctcctcccttctacctccccactgtcttccctctccactgtcaccactgcctccctcttccactgtcctccatgcactgccctccctccaccttcccccacccccaccactccccatgctgtccccaggctccccccgctctcccccctccccactgtccccctccccatgctgtccccagctcaccccgctctcccccctccccactgtccccctccccatgctgtacccagctcaccccgctctcccctctccccactgtcccccctcccactccccatgctgtccccagctcaccctacatggacttggcgatgtccttccatggctcaccggtctgaatttccatgatgagccgggcctgcagctttgctcccctatccctgcccaggctgcagccatccatgcagggagcgagctccagcacctgcggagtccttccgtgggggcctctccgtgccacagcagccagggacctcaggtgcctgtgcatgacaccaccgcccatcctcatcctgagccagcctctcaggatcaggacttggtttggcggcgttaaccttagagcctgcaaggggcttcctcctggtgggtctggccgtagcctggggaggccacagctccaggccactccagacctcccttcctctgggccttccatgtggtggcaaccaccgcagctgtaagggagggaaaatggagcgtttgttctcgggctgggctggggtctgggggaagccatgggcgtgaagactggggtattatttgatggagaagcggccactcctggagaccggcggcaaacacagaagcacagcgtggaaggtgctggtgtcagcccacacgggtgatggggtcagactcaggagtcacactcaggagtcaccaggctcaaagggcccaggcaccgcaagtcctgctcagccccagacacaatgcattcctgttgccctcgccctcagccaggccccacgcaggccagggagcactggcaaagcttggcaaccctctgggggccagccttcatccaggccgaaggtggtcagtggcccaccatggcccaggtagaaaactcacggattaagatttcatgcccgactccaaaggcaagagactttattattttattttttttgagccagagtatcgctctgtcacctaggctggagtgcaatctctgctcattgcaacatctgcctcccggactcaagcaattctgcctcagcctcccaagtagctgggattacaggtgtgcgccaccatgcccaggtaattgttgtatttttagtagagacagggtttcaccatgttggtcaggctggtttcaaactcctgacctcaaatgatctgcccacctcgacctcccaaagtgctgggattacaggtgcgagccaccgcacctggctaccagacacttcagagttacaggttagtttttctttttcttttattttttttttttggcggaggtgcagggggagttaaacaaacaaacaaaataaacaggccgggtgcggtggctcatgcctgtaatcccagcactttaggaggcctaggtgggtggatcacgagatcaggggttcaagaccagcctggccgagatggtaaaaccccgtctccactaaaaatacaaaaattggccaggcacggtggctcacacctgtaatcccagtactttgggaggctgaggtgggcagatcacctgaggtcaggagttcaagaccaacctgaccaacatggagaaaccccatctctactaaaaatacaaaattagccaggtgtggtggtgcatgcctgtaattccagctactcgggaggctgaggcaggagaattgcttgaacccaggaggcagaggttgcagtgggccaagatggcgccattgcactccagcctgggaacaagagcgaaactctgactaaaaaagaaagaaagaaagaaaaaaattagttgggcacggtggcaggcgcctgtaatcccaggtactcaggaggctgaggcaggagaattgcttgaacccgggaggcagaggtcgcagtgagccgagattgcaccactgccctccagcctgggtgacagagcaagactccgtctcaaaaaaaaaaaaaaaaaaaattggatacattgtaatacctcaaatacttgtaagtgaagcaccccagttcccatagagctgccgcactcagaggcttctgtaacctgcctgctcccagcattctatttagggtctggtatgtccagaatttgcagacacagcaattcctgcagcagcagtgcaccatgtggaaggggccccatgaccagcccactgtgagctcacacgtgatgactgaggcttcttcacacagcagggctctgggtgtgatacccagggcacacgcgtttgcacaggcacaggccacacaagttctcacatgctcagccccataagccgtgctggacaggcatggccatttacacccaggatcctgctgagaacagcaaccaactcaccaccctcgcatcatgatccttgccacacaggggctctggtggctttggtggcctgggctgtggctctgctgccagccaccttgagtgaagatccgggttctctgggtgctactcagctgctatgtggggagctggcccctggggtgatgagggcccttcccaacccgccctcagcccttggacagccaggatcacccggggctgtctgcatacagacttctcaggggagttctcagcttggacccttatctccccagaatcctggaacctgctccttctgctctcgtgactgactgtgttctctatgcaacttccaataaaacctcttcatttgaaaggaaaaaagtctgcattatctgtttaggaagggagagagttcatattgcaatctttttttttttaataaaaataatctcagcctgggcaacatggtgagaccccatctctgtaaaacatttttaaaaaattagccgggtatggtggcgcacacttgtagtcccagctactcaggaggctgaagcgggaggatccattgaacctgagaagtcgaagctgcagtgagctgtgattgtgccactgtactccagcctggacaacagagtgagacgccgtctcaaataaataaatacataaataaaggactctgaagccttattaccatggttcactctaagtatttttgctctgaggtgtgcttccatacataactttcattatgcccattagggtccataactataaaaatccacaattaagtcatattttatatgctaatttgtcagcccgccatggtggctcacgcctataatcccagcactttgggaagccaagacgggaggatcgcttgagtgtaggcgtttgagaccagcttgggcaacattgtgaaaccctctctctacaaaaaatacaaaaattagctggttgtggcggcatgtgcctgtaatcccagctactcaggaagctaaggtgggaggatcagctgagcccaggggtgtcgaggctgcagtgagccatggttgtgccactgcactccagcctcggtgacagagcaaggccctatctctaaataaataaataaataaataaaaattaaaaacaggccggtgcggtggctcacgcctgtaatcccagtgctttgggaggccgaggcgggcagatcacggggtcaggagatcgagaccatcctggctaacacggtgaaaccccatctctactaaaaatacaaaaaattagccgggcgtggtggcgggcgcctgtagttccagctactcaggaggctgaggcaagagaatggtgtgaacctgggaggcggagcttgcagtgagccgagatggcaccactgtactccagcctgggtgacagagcgagactccgtctaaaaaaaaaaaaaaaaaaaaattaaaaataatttgtcaattggctgggtgcggtcctgtaatcctagcactttgggaggccgaggtgggcggatcacctgaggtcaggagtttgagactagcctgggcaatatggtgaagccctatctatactaaaaatacaaaagttaaccaggtgtggtggcgggcgcctgtaatccaagctactcaggaggctgaggcaggagaattgcttaaaaccgggagacaaaggttgcaatgagctgagatcacgccactgcactccagcctgggtgagagagggagactccatctcaacaacaacaaaaaagtcaagataacatttttcttaggtattcccctaatttaggtatttagaaataataccctatggttggataaatccagataattaccagatagagattggatattgtcgaacattattgttcaaataatctttcatttctgccaagaaatccttttgagtaatttgtgtttgatcgaattgcttttaaccaaatcatctgtatttttttcttcttttacacattacccatatccctttttcctgaacccagaattcaatcactttgaccctctctgcctctcattctcccaagccacccacaggtgacaatcttcactttaatttgtcctctgcagggatcgaaatgggaaaaacccggccaggtaagcaggcagggaggacaggctggagtcgggtgtggggagtcagccactgaggtcaggagccctgcaggcagcaagccacccgggcttaggagggatggtttagaaagtatcaacaaaggctggaaacagtggctcacgcctgtaattccagcactttgggaggctgaggcaggtggatcatctgaggtcaggcgttcaagaccagcctggccaacatggcgaaaccccatctctacaaaactacaaaaaagttagccaggcatgatggtgggtgcctgtcatcccagctactcgggaggctgaggcaggagaatcatggtggctgctgaggcagcagaacaaggctgttctgctctgcggtttgtgggtttgacactcgtggcccaggaggcggaggttgcagcgcagtgcagtggccgagatcgcgccacgagcctgggcaacagagcaagactccatctgaaaaaaaaaaaagtatcaacgatgaaattatcgacgatggggtaaccccgggaacctctctgcctccaccgtgaagaagcatcaagcagaacccggctgtgtgcaagggagtcacatgccttcggaagagcccaggtctgggcacagctgcctgctcagaccagagggaggcctgccatgccccaggaaggcactggcttggagtttttcttcattgtgaagaatcacgatgacgaattagaatcagtgagtttggcacgaatgaggtgcttcctccaggacgttgctggagggcgctgctatagctggcatcccggcctggaggcacttcccctctcattcttctcaggagtcagtcctgactgagacctgctcccagggcaggactctgggcttcaggagcgtggtcctgagccgcagggacatggtggctggtctgcaacaggcttcccatcccgtggacatgtggacactccagagccctggaatttcagcaacatcagccaacggccacagggacaaccacagtaaagccagcctgccagcagaaaagtaacagactgagctaaaatcacctctggaacttcctgtctacctggacacctgtctacagggcctgagagaggaactgacactttctcctccagcagagccatgtcaggaaggagcctctccggcaaaggctgcccaggcccacccggactccactcagagcctgagcccttggttcccgtgaagctctgagggcaggttggcagccacaacactgggccaggacccaagatggggcaggccaggccctccaccaagggcccagaccctctatgcaaatgcaggccatgcctgtgtgcagccaggggcccctgggagaatgcagtgaggaagggcaggtggatgtgcttggactgagacagaaagctccagggtgacgcttgccatgagcgtgggcacgaccctcctcctcttcctcctcctcctcctcctcttcctcctcctcctcctcttcctcctcctcctctttcttttccttctcttccaggcacttcccctgcagctgcagtgggaggtgtttccagatgctggaatgtgctcctggggcagcagctccctgcctgctggagtctcctgggctcctctgctgggctgtgcacacagcactgatcttagggcacagccggtggggaggccacacaggggaatcctcctgtggcactggggataaaggtcctgtcttccagccgggggcaactccatccagtgtggcctaaggcaaaacttggaatccatgttgactgatttttgagatggtgttttgcgaacagtaaagggataggcaaagttcttgttgtaagccactcaggcaccctcctgacagaagcctggggattccggaggtaaaagctgtaaggttgggagtggaccctggagcccactcccccgacccccgaccctcaatgaggttctttagaagactgtgccctggggctgcccacacagccaggcactctagggcctgggaagacactgctctcccgtgcatgtcggggacacaggctttcgtcctcagcagttgtgcaggtcaggtggggactcagggaaggcagccgggctgggtgagagcttagacagagacaatgaccagccacaagatgcagttaaacaaatacacaaacctgctttccaatggtttacaatggattctgaacagcccggggccccagaacagctagattcctcactcctctccattctcaggccaacctgtggtctcattttataaaaaagagattgggctggtttactcagccaagaaacatcgaagagatggtacctaaaaccaagggctttggatcatctgtctggcccagggcgtcccacctccctgcctctgacaggacttcccacctccccgcctctgacttcagttgggaagaggatggtggcgggagatggaggatgaggccctcctcatctgcttggccaaggctgttctgctctgcggtttgtgggtttgacactcgtggccttgaaagcaagcctcccggcccagcctccatcttcctgacagtagtgctgcctgtgagtatttgcatggcacggcaaagtcacagctcagcagacactcctgataacactcttaacaacaccatgcacaggggagggtgagcacactgcccttctggagaccaggaaactccccgaagcctcagggtgattgacctgcccctgccacgcccctaatagctccatcttctcactccaccttcctgcctctttctgagtcgtggttccaggtgcctgcctgccctgggtgagtgaagccaccagtacacacccagtcacattagaactgcccagttccatcccaggccagtgtaaaccaaaaataaaacccgaagtccccagccaactgaagtgacccccgcttggccatgtccaccccagagaagcctgaaaaacctcctcctgggtggtcgcacaggcctcgttatgtcaccgagcagctcagcttcgaactgtgttttaacacggcctttctttcctcctttctccccagtctcaagacatggctttgagcaaactacagatgtgcttcctttcatcttgaaatccagcctgggagcaagctgtgagcctactgccttccctctcccacctgcagctcccgggccctgtgcacatttgtttatctggatgcttgctgagtgcacaccatgctcacctgtctggtcatctatttcctagaagctttgggggccagatcctgggacgaaccaggcatctccagaattccttccccagcaggcgggttactttgaggccagagcttactcctggctaaagactcactgcaagattgactgtgattgatttctaatctgggggcgacccgcgatggcgcagccccttcaccagatgtgtttgtggtggaagttatccaagtgacacggcaccaaaacctgtgatcggtggcaaatccgtacaggtctgcggcagccgcaattctcacctcctcagaagaaagaattcgaccaaggggcagaaggcagaagaagagaccgagacaagttttagagcaggagtgacatttattaaaaagctttagagcaggaatgaaaggaaggaaaggacgcttggaagggggccaagcaggtgacttgaaggacaggtgtgtggtttgaccttcgacttggggttttatatgttggcacgcttccggggtctggcctgccttctcccctgattcttcccttggggtgggctgtccacatgtgcagtggctgccagcccttgggaggagcacgcgctatgtgtttactggagttgcgcgcctgcttacctgaggcgttgttcccttacctgtcaaatgtccctaggaggccatagaccagttacactccacaattttgccttttaatacacatgcttgagcccactcacccaatgcctgaggtcttatggggaaggatttttctgtctgttgggaggctgcctttccctggcgttggctgtgaccaattattattttagagagacagttaacagccacccgaccaacactgatggtcgcctgacattcctggttgggagggccctctcctgccctgctcatgtctgaccagctgcctactgtaacagatggaacaataactcaagagaagccatcagagcaggtcacctggcacctcctggcccctgcctcgcctgcattccagaccccctctacacgtccctctacaaattgaagagtggccatttttggaaaggattccggccaatctcccccttgctagcatgagaatgaagctcacgctctttcttttttctttcttttctttttttttttgagacggagtctcgctctgtcaccccggctggagtgtagtggcgtgatctcggctcactgcaagctccgcctcccgggttcacaccattcttctgcctcagcctcctgagtagctgggactacaggcgcccgccaccgcgcccggctaattttttgtatttttagtagagacggggtttcaccgtgttagccaggatggtgtcgatctcctgacatcgtgatctgcccgcctcggcctcccaaagtgctgggattacaggtgtgagccaccgcgcccggcagctcactctctttctatcacgccccactcttgtcatcgtggcttctttttaagcggtgagcagccagacctttgctggttacagccacaaccctccctttcagagttgaggcacagctggccagtcctgacattaaaatcaggatcctaagacggatggaacacactctatgtggcaataagacaccaaattccagcctgactctggtatagcatcacgtgacggatagcagactctgaaggaaatgagaatattttgccttaaaatatatttctttgacatattttgaaagggtcccacagaaccatcctttctcagagaaactagcacccatagagaatctccacgaatgcagccaggacttcctcttctagtactttccagacctaggagagattaactgagggcctgacacctttaaggtctgaaaagggacatttgccatctattctctctgagggctgcaatctacaaggcttcatctgcaaaccaagggcctcggcccccacacccctcatcttaattccagccttccttccagctgacttcacctctgtagacaaagcttcacgctttcaatcaaccgtcaactaaagaatcgcagaaccagccggtgcagtggctgatgcctgtaatcctaacactttgggaggccgaggtgggcggatcacttgaggtcaggaggtcaagaccagcctggccaacatggtgaaaccccgtctctactaaaaatacaaaaattcaccaggcatggtggtgggcgcctgtaatcccagctacttgggaggctgaagcacgagaatcacttgaacccaggaggcagaggttgcagtgagctgagatcgcaccactgcactccagcctgggcgacagagtgagacacagtctcaaaaaaaaaaaaaaaaaagaatcgtggaacctacctatgacctgtaaaccctgctccaagatctcctgcctttcaggccaaatcagtgtgcaccttccacattctgatttatgtcttggcctgtaacttgtgtcttcctgaaatgagtaaaaccaaactgtaacccggccgcctcggggccactcagtcaagctgtaacccggccgcctcggggccactcagtcaagctgtaacccggccgcctcggggccactcactcaggctgtaacccggccgcctcggggccactcagtcaagctgtaacccggccgcctcggggcgactcactcaaggcttcctgggtttgcttctctccaggccacagtcacatgtacaggctcagaataaacctctgtaaaatgttctagagtctgttttttcccattaacagcagttacggaagggttgttttaccacaaagggatcccaatccagaccccaagacggtacttggacctccttccagaaagaatttgggacgattttataaagtgaaagcaagtttattaagaaagtaaaggaataagaaaaatggccactccataggcagagcagaagtatgggctactggttggctatttttacggttatttattgattatatgctaaacaaggggtaaattattcatgagctttccgggaaaggggtgggcaattcctgaaactgagggttcctcctttatttgttttttgtttatttattttttgagacaggtctcactttgtcacccaggctggagtgcagcgatgtgatttcggctcattgcaacctccgaatcccgggttcaaaagattctcatgtctcagcctcccaagtagttgggattacagatgtgcaccaccacacctggttaatttttgtatttttagtagagatagggtttttgccatgttgaccaggctggtctccaaactcctggtctcaagtgacctgcccatctcagcctctcaaagtgttgggattacaggcgtgagccactgcatctggccatcctcccctttttagacaatatagggtaacttcctgatgttgccatggcatttataaactgtcgtggtgctggtgagagtgtctcttagcatgctaatacattataatcagcgtataaagagcagccacatggtgaaaccctgtctcctctactaaaatacaaaaaattagccaggcatggaggcgtgtgcctgtaatcccagctactcgggaggctgaggcaggggaattgctagaacccaggaggcggaggttgcagtgagctgatatcacaccactgcactccagcctgggtgacagagcgagactaggtctcaaaaaaaaaaaaaaaaaaggcaaggcgaggtgactcacgcctgtaatcccagcactttgggaggccgaggcaggcggatcacaaggtcaggagatcaagaccatcctgactaagacagtgaaaccccgtctctactaaaaatacaaaaaaattagccgggcctggtggcgggcacctgtagtcccagctactcaggaggctgaggcaggagaatggcgtgaacccgggaggcaaagcttgcagtgagccgagatcacgccgctgcactccagcctgggtgacagagcaagtctccgtctcaatgttaaaaaaaaaaggagcagtgaggacgaccagaggtcagtcttgtcaccatcttggttttggtgggttttacccagcttctttaccacaacgtgctttattagtgagatctgtgtgacccgtaccttgtgccgacctcctgtctcatcctgtgacttagaatgcctgacaccctgggaatacagcccagtaggtctcagcctcattctacccagtgcctatttaagatggagtcactctggttcaaatacctctgacagtggggtgggacccaggtacatctaacatgcagccagcttatactcactcagaagaaccattgtgctgtgcaaatggcaggccaaaggaagtgaccaacagttacctcacgggagcagtcttatggcgacagacagggtcccaccgtgattttactgaaaggagccagaggcccagggggatgggatggtctggccaggggttgtgatccatggcaatagccacgttggccaccaccagaatgggtgaggggagacaatctgggaagccagggaggaaaacgtggggtatgctcacccctggggccaacgctgcacttgctggagcatgagggtcttccccaggcctcaccttggtgcagccctgcccagggccccaggtgtggaaaccattactaaatattcaagaattttgcagctagttgagaactagctggaagcttacaaatggccacagcaggagtatggagcatttacacgacagaaactgtgaactctaaaatcagggctgtgcttggggtgtgttttgtttggaacacctgcttagccgcacctaccactccttgctctcccatggccagccctgagcccacaaccttctccaaattatttatttatttatttatttattgagacggagtctcgctctgtcgcccaggctgaagtgcactggcgtgatctcggctcacagcaacctccgcctcacgggttcaagtaattgacctgcctcagcctcccgagtagctgggactacagatgcatgccaccacgcccagctaatttttgtatttttggtagagacaggatttcactatgttggccaggctggtcttgaattcctgacctcaggtgatccgcctgccttggcctcccaaagtgctgggattacaggtgtgagccaccacgcccagcccaaattatttatttatttggatttttgcatttcctgttgagaagttccacgctgacaaatgctgttttgtccaaaaaatcctcaggacaaattggccaagggcattttccttaaataacaatcctttatgtggggcccatggtttatttgcaaaatccatgaatgaattgtcagtgtctttcttagtgactgttggatgactgttttccaaaggccccacccaccctggacacagacccccatgtcagcctcagcttccccgagcagctggcctcactcccgggctgtccccagggaagcccccagagaggtgtgttatattttcaagaaaaggccctcagctcctgaacatgtaacttttctgaattcaatgacagtgactccttttgataaagggaatttccgttcgtttgttttaaaaaaaaatttttttaacggtctctatttttaacactctcagctgaagccccaaggttggcttcatgaggcccagggtccaggacatctcctttcccatgaaactgttctgctgaagcacctggggggtgggggggctttgtattcattcattcatcccacattcactcactcattcatcccacattcactcactcattcattcatcccacattcactcattcattcatcccaaatcacacattcattcattcatcccacattcactcactcattcatcccacattcacccactcattcattcatctcacattcagtcattccttcaacacacattccctcattcatcacacattcagtcactcgttcattcagcccacattcactcactcattaattcatcccacattcactcactcattcattcgtcccacattcactcacccattcatttcagtcactcactcattcattcatcccacattcactcaaccattcagctcagtcactcactcattcattcatcccacattcactcactcattcatccaaaattcactcattcattcattcatcccacattcacgcacccattcatcccacattcacccacccactcatccattcatctcacattcactcactcatccatcccacattcactcactcactctttcggcccacattcactcactcattcatcccacattcactcagcccacattcacttactcacacattcatcacacattcactcactcattcgtcccacattcactcagcccacattctctcactcacacattcatcacacattcactagctcattcattcatcccatattcactcacttttcactcatcccacattcattcacaggcatccatccatccattccacattcatgtgtccctgacagatgtcaggtgtcaggtggtgggacctgttccaggaattggagacagagggcaagccatgcagaaggcaggtaaaccagacagtgttggagtgacctgggctctgggagagaatcaaacaggggacttatcaaactgtgagtgttagggaggcttctgaggaggtgacatttgtcaaacctatgaccttgtgtcctgtatccttccatccattcatccctccctccctccctccttcccttcatctatccatccatccctccatccatccatccctcatctctccatccatccatccttccctcctgtccatccctccctccctccctccatccatccatccctccctcccatccaccccctccctccctccatccatccatccctagctccctacctccatccatccatccctccatccatccatccattcctccttccctacctccatccatccatccctccctccctacctccatccatccatccctccatccatccatccattcctccctccctacctccatccatccatccctccctccatccatccattcctccctccctccatccttctatccctccatccttcccttccatccatccattcctccatccctccatccatccctccctccattcttccctcccgtccatccttccctacctcttgtccatccctccctctctccctccctccattcatccattcctccctcccttcatccatccatccctcctccttccatccttccatctatccatccctcccacccacccatccctccctccgtcatccctccctccatccctccattcctgtatccctccctccttccctccattcatccatccagccagccaaccatctatccttttgtttgctcctgtcctgggtgccgggaatgtgtggcctgcagtatttacaccccttgctgtggcaccatgcctagctggagagacagacacatgtaagtcaccagtcatctccccaaggggtgggcctggggctgacggagaaacccagaatgttcttccacagtaggtggggaatgccagctgagcaggggactcaagagagaggttgggggagcagggcctctccatgcagaaatcttacccatggtgggtaggaacttccaaaggtgaaggacagtgggcttctcttcaggttgatggattactttttaaaatcataacataagtcaggcatggtggctcatgcctgtagtcccagctactcaggaggcagaggcaggaggatcacttgagcccaggagtttgagaccagcctgagcaatatagcaagacatgtctttaaaataaaataaaataataacatcaagttgtccctcggtatcctttgaggattagtcccaggacccctgcagatactgaagtccccagaataaaatggcgcagtgtctgcctagcacctgtgcccaccctcccgcacatcttcctgcatcctgcaaaccattgctagatcacttatcagacctaacacaacacaatgctctgtcaatagctatactgtattttttatttgtgttcttttttattgctgtattgttctttttttcatttttctttttcaaatattttgcatctggcttggttgcctccagggatgtggaacccttgggtctggagggacagctggtctctctgttggtgaaaatattcccttaacctggagaatacttttgccacttttgctcagtctgctcctggatccggtctgtgtcattttgcccggatcctgggcccgctcccaaggagggctcccccagctgcaggggtgagggcctgtgctgtgtgggcgcatggctcatctgccagcgacccatgattgttccctggggctctgccacccccagctgactcctctacacagctcctgatgccttgggcaggccgtgttgggggggtgtatcccagaaaggcattgtgtggggggctggtatcgctaggggcctggggtccccggtcccctctgtgactttcatgagcagaatggaggtacccagtctctcctcatgtcaccacaccccgctatcaggaagggacagggtctcaggttcctagtgttcccaggacctgcctgccggagggctgcagctgaactgctgttagcgtgggtggctctgaatcaatggcccatttttctgtgcagtgtgttgggggcagcctgagcctctcactcaggttgaacaggagcttggggaaccctcttccagaccctgaaggggtcctgctctgtgtcctgaccaacactcatagggtctgctctgtggtcctgacctcactcaggccctgctctatagcaaagaagcaagctagacctttctcctttgatgtggagacgggaaaaaacaagttttagaataacatgcccagaatgaccccaactaggaacaatcgactgtaggactgggaggatttgaacatgtgcaagcaaaaggaggcaccagagggctgttcagatggataactgtgcaggtgggcatccgtgcgggtgggcatccatgcaggtggacattcacgcaggtaggcctttgtacaggtgggcatccgtgcaggtgggcatctgtgcaggtgggtattcgtgcatgtggacacaggtgggcattcatgcaggtggacatctgtgcaggcggacatttttgcaggtgggcatttgtgtgggtgggcttctgtgcaggtgggcatttgtgccagtggacacgggtgcaggtgggcatttgtgccagtggacatgggtgcaggtgggctttcaggcaagtgggtattcatgcaggtaggcatctgtgcaggtggatatcagtgcagatgggcatttgcatgtggacatctgtacaggtggacattggtacaagtgggcactcatgcaggtgggcactcatgcaggtgggcatctgtgcaggtggacatccattagctgtcacccttctacccaccatccacatcctgaggatccagggcctccttccttgcaatatgtcccccactgtcacctcaacaggtaaggcaggtccttaccacctgcctctgcctgccctccaggtcagcctcccaaggttgggccttcttcttgcctcagactcacttgctttgcagcagtgtggctatgttatgggcccacatccgaaatccacacagcccacaccacctgcaggacaagggcagccagttaagcttgtacagtcagtcagggctcactgctccctccctggccctcccttgccctctgagaggcccttttcttacccacccaggtgtccatccacctgccctggggtcccctcccctcctgtacccttgcagctcccatgagcctcagccccctccaagcccgtctccctagcaaaaccttccctgagactctagcccttccctttctgctgtgataggatcttaccacatctgcagaagatttagtgcctcccggccctgaggccccgatgaatcacccaggcctgggttcttcctgcggacggaagacactgacggaggctgcggggcctgcttccctgagaacttgcacgttgacatcctcctccttggtggctccttccaaacacaacaaacgtgcaggcccagaaggacaggcaggatggcgatgtgggggcagggagggctgagagcagctgcccccagggagggagagggccagagagagtgaccggagggacacagacatggacatgtccccaccatcgccggggctggaaaggaacaacccaaaatgtctctggactttgtcgagtatcccctggggtttcaaatggcctgggggtgagaagctctggtccaggcaaagttgtgtccctggacaatgactgtgtccaaatcataccccccgcccggggtctgagtcatccagtcgtgccacggtggtggctcttctgcatgtggaccagagacacctgttttccctgatgcccaagacagtgttagcgatgaacaaatgaatgaacaaacgctgcagaggggaggcctccctcagcctggggctgcttgcccaccttccccgtgtgtcctcctgcccccagccctggagggagcccacagtctcacttcggaaaacccctccagaaagcccgggacagagcaggtgtgtggttcagctcgaggaggaaaccggaagcggccatgaacccacgcctgggcagccacctggaaacgtggtcagatgtgacctcttcacagactcgggggtgctgggctctgagcagaagcggccgggtggtcctcctgggtgcctcaggggcccggggagcatgggtcagggcgagtggctgctccctggcctcaggttatctgggtgcccggtgagtgaggcatggcaggcgataccggaccccacccaccgcgtatacctctggaatagcgattgccatgattgatgtcagtagcctgggctgggagcctgcaggtgggtgtgagggggtggaaggagctggtgtgagaggaagtagggcaagcgggggctgggaactggtttgggaacaaccgcagcctggtcagcaggacccacagggcctggacaggggctggagctgaccgctggctgaccggctttgctgcagccacgttcctgcaggggacacagacccacccacattagaaaagtgacccctgcacccccagtcagcctcccggaacggctgtcaccactgtttcctgattcgctggtgcatgtctcccccacggggcacacatgcgtggccttaggcctgaacagagctgctcacagcacccacttccctttcggttttaaagctgctgtgcccgggggagggaagccttcccccaatgggtgttcttatttattttcttaatcacaggtaatcagaactgcgaagatgattgggtcacagccaggagactgattttgtatccagaagtttctgtttcacaatcactaaactactcatgctcaaagattagtgtcaacaagaaataaacagactctgataccgatataaaatgaacgcgcgttcaagatttccttcaactcattgttagcgcagaaaccggtaagatgtgccagccaggtcaaaggagaagtgacaaaggcacctgtgtacgcggagtaaagggatacaggtacgcttcacatacgaggactggctctcccacggacgggcgggcggtgggaactcgtgggcagccgcgggcagagcccatctgcatgctgtccaggcagtccagactgtccaggctgctgcaacagaggaccacaggcggggcctagaaaccgcagatgtttgtcctcgcacatttctggaggccagagtccagcatcaaggcgtcggcaggactggctccttctgggaactcggagagaatccggtccagcctcagccccttctggcacagccggcagccctggtgtcccccgatcaaggccgcggtgctccagtctccgactccgtcctcctgtggtttgcctctgcggaccccaaatctccctctcgttccttccacacgggtgctagtgtcggattcagggtccatctgcataacccaggatgacctcgtctcaagagccttaatttgtctgggcacggtgactcacgcctgcaatcccagcactttgggaggccaaggcaggcaggttgcctgaggtcaggagtttaagaccagcctggccagcatagtgaaaccccatctctactaaaaatacaaaaattagctgggtgtggtggtgggtgcctgtaatcccagctacttgggaggctgaggcaggagaattgcttgaacccaggaggcagaggttgcagtgagccgagatcgtgccactgcactccagcctgggcaacaagagtgagactccgcctaaaaaaaaaaaaaaaacaaaaaacaaaacaaaaaaacaaaaaaaaagccttaatctaatgacgcatctacaaacaccctatttccaaataagctcaaccccataggcatgagggtcgggacttacacatagcttttgggggccactgtcaacccactacacgtggctataagcaagagttatctgcattgctctctgttatctgtaatgtacagattggaaaatcgctcaaaggcagcgcgaggctaaaatcagaaaacccagaagggagatggctcccactgcaggcacccagtcctccttcaggctcggctgcgtgttccagacatgctcacactcacttctcagggtcattccaaggctcccagaatggccgctgtgtttttttgttttttttttttttgagacggagtcttggtctgtcgcccaggctggagtgcagtggtgcggtctcggctccctgcaacctccacccctgcaggtttaagcaattctctgcctcagcctccggagtagctgggattacaggcacaggccaccacgccggctaatttttttgtatttttagtagagacagggtttcaccatcttggccaggctggtcttgaactcctgacctcatgatccacccgccttggcctcccaaagtgctgggattacaggcgtgagccgcctggcccgctgtatctttttacgcccacccgtccctgggggctgcaggcacaggccctgggggcctggtcagtgctgtttgggcagggggaatcctggacctggaaaggggaggggtctggagcacagaggagccaggtgagggaggcctccaggtgcaggcagggtggagcctgggatggagtgatgcaagagcccgctccactccgccagcacccaacagctcttccctttctctcccaggcctcctgccttccctcttccctggtcttcccttcaacaccaagactgcaggcatcacccccaccctaagagcccaagcaaccaccgacgccccatccccttcccctccccctatcccctcccctctccccctcggtccctttttcccatgggcgctggagcttgcagggcagctgtacccgtggctccctctccaaatgctcccctaacgcacgcccttctcacttccatcgggctctgctcagagagacctaccaatgtccagcacccatggccgcaatactgcgtgagctgagacccccctgcagccatccccatctgcaccacaggtactcagcagacaatggctgcaggtgggcgagggcaccctcaccatccacctcaagtgcagacctgccagcctcacgctcagcccttgggcctggctggggaagtgtctagggcacagatcctggcacagggcaggcccctcctccacatttcacagatggcagatgaatgaggaggaggggaaggagggggtgagcagcccattgccaaaagcccgtgggaaatagggatcctgggggagatcctggctcacggagatcagaggggcggggccaccaaggaagggtgtggggggaaggcagctgctgctcatggaaggcagccggatggaggtagcggggtcaggcagaacaggcctgaagagaggggcatagggtagggacatcaaaggaagaggcagcggttgccctggccagggcccacagcaggtgcgggcatggctctgggctggctcacctggcccccccgacaccctccctgcagagcccccgcccacagctgctccacagggggtaccagtgggtgtcaacccctggcagcggggacaccaggcctctctgagctgatatggggggtgcaggggcagccctggagtcccagcgggctgtgccctctgtcctggcctcatccctgtgaaactgcctttgcaaaaattgtaacagccattattccggaggtcacacaatttgcaacttccccaattactcctgaggatgaatcactattgtagacgctaagatcggccttttgaggtgtcttttcaggtttttgcatttctgacaatgatggctccacctggatttggacacaccaacccccctgcccgccacaaacgggtcctgtggccccacccagaagcagactccctggcctgccaaactatccttgaaaaacccgagcctgagaattttgggggagatgattgatttgagtaataactccgtctcttgggggagattgatttgagtaataactccatctcccacgtggcatggccagcctggtgtctattaaactctttatagcaatgccttgggcccagtgaagaggttttgtctgtgcaggggcaggaagagcccatcaggcggttacacctggaggcccagccctgagcctcccgccttctccagcgtctgcagaagctgacccagagcctctgcttcgggattcctgggctgtggtcagggtgggtctggggactcccgtgctgcggggctcctggtctgctccccagaggctgtgggcagaagctgagacctctgaagaaatcctagggattttcaggaaaccagtgcatgttttctcttctctaaccatgcacaggggacacagaaagccccaaagatcggggccactgcgattcgttttccagagaaggacgctccgagtttgcactctgaccgcactgatggggccctgttcctccggtgtccatggctcccagcaaagcagaccagcaccgcccccacgcacacctaggcccagcccagccccaacaccggctgccgagctcaccatgatgagggctaatggctctgggcatcggcctgcaagcatttactgagcacctactgtatgctcagtgcccacaggccgagaggcaacgaagacaaagtctctgtccttagttcagggaagccactcccaggcagggttctaggaaagaaagagccccgggctgcatccgcacttctctgggctccaacaggatgtggttgcatcatctcctggaggaacggatttgccttgaaacgcaggaggcagagcgggcctgggagaaggaggttgtttccacgccttcctgggggagaggctggtgcagtcgtgagagtcaaccgggagctcggaggaggagcagacaggacgtgggagagctcgggagagacccaggctgggcgtcttgcagctcagacccttggccacccaagcagcgtagccggcatcacagcccacggcgtgaggccaccaagacagacagaggaggtgagggggacccggactgggccagccacacgtggaggtcgtggaggaagcaggcatctatgcggaatctcggccgcccagtctgccttgtccacagagaggtgcctgtccgctgcttcgagcgtgtgccgacgtctcccgaatgtgtcccctttctcttcttccttgggatttcctaacgtctgacgatcccagcttgcgttggccccctgtgctgtggccccacgacgttttgtccagcttgatcagagcagaaaggggacctggtgggcagcccaaggggcaggaaacttccgggtggattccagcacagccccagccctgccggggtcttcatgccaaacccctggtcggccaggcttgaagctgggctgtggagccacagtcctggcctacaggcaggtgcttaagtcactcaggccactatgacacagttccacagcctgggcagcctacataacagacatgtacctctcacagttccagaggctggacgtccacagtgagacactgtctctaaaaaataaataaataaaaaataaacaaaaggccaggaaaaacgtaaggtagtatcaaaaatgtaatgtgtcaatctcttttcatgacaggctacaactgaaaacaccagtcatattaccaaggctgtgaccgaaatcgtgtctctgagaatgtgcctcaagcgttccaagcctggccggccgcgctggctcacgcctatcatcccagcactttgggaggctgaggtgggaagatcacctggtgtcaggagtttgagaccagcctggccaacatggtgaaaccccatctctactaaaaatactaaaattagctgggcgtggtgacagccgcctgtaatcccagctacctgggaggctgagacaggagaaccgcttgaacccgggaggcagaggttgaagtgagccaacatcgcgccattgcgctccagcctgggcaacaagatcaaaactccatcccccctccaaataaaaagaaagttcccagccttacagcgagagtaaataaaaactgtcaccatctggcaggcccaggaacctcagggctatcggtcaaatctaaagcctgccttggtttggcttcttagcctcaagaggccattaaatctgagattcccatctgatcaacatagggagaaaagcttatgtttctaaagaaaagctgtaggcctgggtgcagtgcctcacgcctgtaatcccaacactttgggaggctgaggtaggaggatcacttgagcccaggagttcgagaccagcctgggcaaaatagagagacccttatctctatactttttgaaaaaggaaaagaaaagctataatacatctgttaggagattgtagctctgggcattgtatttgagctcttatatctacctacagactagactagatcctaaattcttctagattccttcagtcaaaatttcttccatggaattactaaaaataaaaactgctctgttcctaaatccctataaactgaaactagatgaattttaaggaacaagtctcatatctgacctatgggccccacaggagttcaccaaaccatccaatgccataaccacagacatttcacctgcaaaccaggcagagaagctggcgttttcacactgtagccagggcttccagttcatcgggacgagattctgtatcagagacgccctccctcttaccgtctacctgctcgtgccacaggatcatggtcatttagttcaagtggttcttctgcctcagcctcccgagtagctgggattacaggcacccgccaccacgcctggctaatttttgtatttttagtagagatggggtttcaccatgttggccaggctggtctcgaactcctgatctcaggtgatctgcctgccttggcctcccaaagtgctgggattacaggcgtgcgccaccgcacccggcataaaaattatttcttaataactcttgtattactatcacaaaagactgagaaaccacaacgctgtatgaagtccactgcaaccatggacagaaaatactgtgaggacatctgcccagcaactgcggtccaaccctggactggcaccccccgccgctgatgcttgtagacaaggggaatcgcctcaaaacaacggtgtgatcctcgttttccctttaaaagcctttttctccctttacctccctgaacacacacatagtctaccaccgcacgtgtgttccgactgcaacgccctatttttgaataaatgtcgttttctttcacagagcctctctgttatctaagttgacaaatgtaatcatagcacaacagtggtctctgttgtaatccatatttattcaatttcaacggcatacacactgtggagtaaaagccatgacaaggaggcagggcgtggggctcacgcctgtaatcgcagcactttgggaggccaaggtgggtggatcacttgaggacaggagttcgagaccagcctggccaacatggtgaaaccccgtctctaccaaaaatacaaaaattagctgggcatggtggcgcgcatctgtaatcccagctacataggaggctgaggcaagggaattgcttgaagccaggaagcagagggcgcggcgagctgagactgtgccattgcactccagcatgggcgacagagtgagactccatttccaaaagaaaaatcatggccgggcatggtggctcacacctgtaatcccagcactttgggaggctgaggcaggcggatcacgaggtcaggagatcgagactatcctggctaacagggtgaaaccccatctctactaaaaatatgaaaaaattagctgggtgtggtggcgggcgcctgtagtcccagctactcgggaggctgaggcgggagaatggtgtgaacccgggaggcggagcttgcagtgagccgaggttgtgccactgcactccagcctgggcgacagagcgagactccgtctcaaaaaaaaaaaaaaagaaaaaagaaaaaagaaaaatcatgacattgagaggattgggggaggaaatgtggttgtaaaagggttaaaatgtaaccatgtgtcgcaggaagccaacgcataaagtctaaaatgataaaccaagaagctgagcgtggacccattttccgttctgctgcagtgctccctcccctccccgagtcctcggtgggctggcagacggggctctgccgtggccgactcttggggtccctgcagtaaatccaagcgcctccaaggacatccgagtgaccagggactggtgagttttctttgagttgtagggccgtggcgggctgcctagaggcccccgacatgggctcattctccctccttcttctccgccaagagaagagccgtgatccccaggaggaatcctgtgtggagtgtctgtctggagttggatcagacagtgatccagggatttcttcttctttgaacagtgatggcccaaggccaatcctttcctacagaatcagccttcccagtgttgccacggtggacggcctgaatttatcatacgtggctcttgctggtgacattgccacgtgtgggaactactgtacatcagatgcctgccccagcagcctggccggtctcagagcgagacacgctgctcaccagccctcccggtacctcaggggccagaagtggacaatcagccctgcgcctggaccggccatccctgggcggcaggtcaggacctcctccaccaggcccgcatgccgctgggaccatacatgaagggaaggtcccaggaggtgacgctgtcggagccgatggccttgagactggtgccgggctgcagagagaaacgcgtcctcggcagacctcgtcagcgctgacacagacgcttcatcatgggagccttggccacagctgtgccctaggtggtgattatgagaagaccaattctaggaaatttgaggaaggaacagcaagttctcttgattaaactatgaatgaattttaaaagtctgtaatcggacagttttcttccttggacgtttctgtgactctgggagctgactatatggcttcaaaccaaccctgagcctctaccccaggacagaacgcagggctcccgggtgagtgcaccgagctgaaggacctgagagcggtccattgccaggtggctccattaggggcatctcacctgaggctgcctccagggtaaggctcggcctcagggatggagagtggtgctcacactgggggccctggattctatgggcagcaaagccgtgtgtgctacatgaacaggcccggccaagaggtccccacccactctgcatgaccgggatcagctcatcggtgcttcagggcaggatgaccccacctgctccctgacagacaggtctggccgtgggtgataaacctgtgtaggcttccaaggcctcagcagtgcatgtgtcttgctcctggaggggccagaggaacagctgctctgtgtccctaccagtaggatgaggaccgtctcggacaaacgtccctcaaggcctgtgtcctcccaccaggaagccacagacaaggctgaagctgggcctcccacagccaaagaggagctgtcctgggactgaaaagaggaagcaagcccagatctccacacctcccgtcccgactctggcgtcactgaggtgcctgcccccgtgtcacggctgtgggtgttgtgctgatgcaatctcaacagcagagaagcacgcacatcctgcaggcccacgtgggcccccgacctggcagatggggccctgggagaccagcccagagtgccactagtgccctccagccaggctccagccacccatctcttagaacagggccctgctctcagcaccaggggcatctttgtcctggggccatcctgtgtggttagggtattgagccgcaccctggcctccaccctccaggtgcccgtggcacctctgccccaagtcatgacaaccaaacatgtctccagacactgccagtgtcccctgcggggtaaaattgcccctggttgaaaacgaccactttagaattgacgtttactaacccatcaccgtcgaatctaaggttgaaaggtgtgtgcataaacacagggaccgaaattctcaacaaatgccgtaagttggcaaaatcacaggtagttgaaattcctaattatatctttattaccagtggagagaagctcccctaggaagtgtcagatcccacggggatgcctcacagtttctcattattgatcacgatctacgtaaccagagctctgttttgcatgggattttagcgcggtcggtagagttttagacaagaccgcttttgttaatggaaatgttggttctaaaattttatcctggaagttggatctttcttgcacctatttttggaaaatctgctcttttgatttttgtgggtgtgtgaatgtgtattctatgaatcttttataagatggtgttgaatgtcccagatcataaataaggtgtttacgccacttctgtgagtggatcaggaccagacagccaggttttatttctatttggccaccaagagcgcccattccatgaaagccaactcgtggctccttcttgacagaggcatcttacaaaaaaaaaaaaaaaatgaaggacggctcaacaatcactgttagactcgattaaaaagaaatatctaagagcaaatctgcttgaggctcgtgacattccttggcagggcgggggcttcccagctggagccatcccatttctcagagggggtctctggctctcagacaaactcaggatgtgcacaggcattggtcagggccgggaaggccatcactcaagacgacgtctgtcccaagagtacatgcgagattttaatatttgttttacaggccattgtggtttactcttgtttcctaggaggaagcatcaggaatggtaacaattgaaccaaatcatgaaccgtgaagaacaacactctaagggaatcttgtgttctggaaaaaaaaaaaaaaaatgtgcaactttggttttcctggctccatatggtcagcaacactgcccttggtgggtgcccatgacccatgaagcccttcccagctctcccagctgtgagccagacgctggcccagtggggagcactgatggctttgggaaggagggcccaccctgtccctgacgttcagcgagcacagtccttgtgacccggtgcgtcctccttgtgttggggtccccccaccagctcagctcagactcaggctgcaaagcaccatgcatggctttggtctcctcttctgggaacccctgaaccccagtgcggtgggcttctcctccccacccggcgcagatcccagcccagtcacccagaccccagctctcagcctcttcctggagcagctgccctgccccacgggaagcggcctggagcccagatgcacagcctggaccagtgtgttgcctctgcaactgctagcaggaacatgatgtcgaaacaccctccatgacacgatccaaatggccctcttactctcttaagtagcaaaataaataccagcatcaaggttctggatggagaccacttcatttgctcacatatttttgcaagccgtttattaggataccgcttaaataattacttcttgtttttatttggcttttcttaaacatggtcttgttaggtgaggtttcataaccaccacacaactgtctttgttctcacgctgctggagcgtgttttatgggcattgtgataatagctgtagtttccaacggttgcagtagctgactagtcagtggcttcagcaacacacatttattctcctacagccctggaggtcagaagctccgatccaggtgttggctgggttccactcctcctggaggcgctaggggaggatctgtgtccctcttaccatttctaggatccgctgcaccccttggctcaggcctctcttccatcttcaaagtcagcagcctctcctcccctctgaccttggcttcctctgcccgactctgaccccttgccttcctcttacaaggaccctgtgatgacctggcgcccacccagctaatccagggaggagaagagaatactgagcgtcttttcgttgtaagcttttcagatttctttggtttttgttcttttaaactgagtgacgcatggatgtatggatggacggatgaattgagacaagatcttgctctgtcatcccagctggagtgcggtgatgtgatcacggcttcctgcagactcgacctgctgggctcaagtgatcttcccatctcagcctcccgggtagttgagaccacagccccgtgccatcacaccatggctaattttttatttttacttctatagagatggggtcttgctatgttgcccaggctggtctggaactcctgggctcaagtcatcctctggccttggcctcccaaagtgctgggattacaggcatgagccagcacgcccagcttgcctgtatttttaaaacagataatggtggctatcaaatcactggggttttgaatacatttaaaagagtgacttcatggttatttcttacatattggttttataatgtatcagaagttatatcctttgcaactacttaaacttacgatgagaaattttagttgttagagactgaatgtgcacatggacagcggccagcccagctataaaaatggaactccaccccacatctgcagcacccagcccaggaggcctcccccctgcccccataaccagcccgggaggtcgccctcatccctggtaagcagcccagaggccgcctgctgtgttgagtcataggaagggagactgtcatctccagagagcatccaggaagctaaacaacagctcctgttaccatcagctccaaacagctgggactggattaatacatcaaatgacaaatgtaattcactcattaattagcttccctaatttttgctcccacttttttttttttttttgagacagaatcttgctctgttgcccaggctggggtgcagtggcgtgatctcggctcactgcaacctctgcctcacaggttcaagcaattctctagcctcagcctcccgagtagcagggattacaggtgcctggcaccacgcatggctattttttgtgtatttttattagagatggggtttcaccgtgttggccagcctgttttcaaactcctgacctcaagtaatccaccggccttggcctcccaaagtgttaggattacaggcgtgaaccaccgcacccggcttcgctttaaacttaggaccaaccagagaaagccactgtgcagccctcaccaatcccataggaaccctgctgtctggtgatccacccccacgcctggccgcctgccttcccagggcacacctgtgcctccgctctcccactccgaagcttcccctccctgcctgcctttgcatctctgccaaacacagaggccagcaccagggacctctgcccagacccaccccgctccaccagcccgagctgtggatccctgccctcatcctatcacatgacacccttgggtggggacccccgtgtgctcatgcacggtggcgggggggtgtctattttcagctgtgtgtccagggaagaagggtcgcctcccattacaaaggcctgaggtccctccctggcccctagatgtccagagagagcccagagcctaaagccctgagatgtgaactgtgtcctgtgtcctgaagccactcagtcacaagtgagacccagaatgactcaccatcagagcaggcagggaaagccagccagacagcccagcagggagcagccccagcccctggggtctgggggactggccgagtggtggcctcctggcccagaggcagcccaaggccctacagaggaggacttaggatagtgctgggaagccccatcagactttctggctcatcacacctcgtcctgagggaagaaggacaaacagcatgcagccttttgaaataacaccattgtccctcatctccatcctgatgcctcaaatcacagagcttcttatgtgctctacaatggcactccccagccttttgggcaccaggacagttccatggagaacaatttttccatggatgcaggtagggggatggttttgggatgaaactgttctatctcagatcatcaggcattagattctcataaggagcacacaattgagatccctcccctgcgcccctatgagactctaatgtggccgctgatctgacaggaggtggtgctcaggctggaatgctcactgctccccatcctcatctcctgctgtgaggctccgttcttaacaggccacagaccagtagtggtttgaggcccgggggttgggaacccctgatgtgtaagtaccaggtgggtgggggtcctcctgacttgtaggtgcccaatgtgggccaggctcagctcgacctgggtgtacacagcccacgccagcccccacccagccccaccttgtctgggtcccttggggccaatgtgcaccaaggacatggagggccctgtgccactgatgggacagcagtggaatcagactaacagtggtcctctcagcagaaactttacaagccagaagagattgggggccaatattcaacattcttaaagaaaataatttccaacccagaatttcatatccagccaaattgagcttcacaagcaaaggagaaataagatccctcttattggggccctgcgtcccaacatggtggaggactacctaggctcgggggagagaagacaggaagggcagctgagagtgccacacacaccacatcacacgtgcactgcagaccccctcacacatgtgagcacagggcataagcacggcctgagtctatggatggagggaggctcccaggcccagagcacacagcaagccaggtcccaaggccagtagacaagaggctcctggcctggatgacgaacacagagatgtgtgcccatgtgacgccatgggatagggccactgtggccagaggacaggagcgaggacggtgttgccggctggacggacagacaggcagagggaggccaggcagaaggagctggctgggtagcctctaaaccactaggaatgggtagagtccatgagcagcaacgatgcaggattcccacaatccttccattttccaagttagtgttgagcctgctaggagctgaggataaggcagcacataaggtaagtttccaagggtcaaatttccatctgtgtgtggaatttgtgttgttcatagactaatcaagtggtttcagatgtctgggtctgtctctaagtctgtttacttgcaaatccaagccaaggttaaacaaatggtcttcattaaaccttcatttgatctcatgtccacagtctgctctgccagtagtttacagccagaggcaaagcaaaccaagaacacagagccatctacagggaaaaatcctgggtaactacttcttctcggaaaagcccatcaccatctccacgctcaagagaatagtgctggacccctacctcacaccatgtaccaaaactaactcagaacagaccaacaaccctaatgtaacagcaaaaaatatagaactctcagacaaaaacccaggggaaaagcctgacaacattgcttttggcagtgatttctaggatatgacaccaaaagcacaagcagcaacagaaaaaaacattaaatttaaaccatctgtgcaccaaggacactgaacagtgaaaacacaaccatgaaatgggagaaggtaggtgcaaattgtgtatctgatatgggatgaatatgcagaatatgattattttatttttacttttttttgagatagagtctcgctctgtcacccaggctggagggcagtggcacaatcttggctcactgcaacctctgcctcccgggttcaagtgattctcgtgcctcaacctcccaagcagctgagattataggcgtgtgccaccattcccggctaattttcagtagtagagacagggttttgccatgttggccaggctggtctcaaacttctggcctcaagtgatccacctgcctcagcctcccaaagtgctgggattacaggtgtgaaccaccgtgcccagccatgattattattattttttaaatatagagaccagatcttgctatgttgcccaggctggtcttgaactcctgaactcaagcaattctcctgctttggcctcccaaaatgctgtgattacaggcatgaaccaccacgcccggcccagaatatgattttttttaattggcagagacaaggtctcattttgtcacccaggctggagtgcaatggcacaatctcggctcactgcaacctccgcctcccaggttcaagtggttcttctgcctcagcctcccgagtagctgggattacaggcacctgccaacatgcctggctaatttttgtatttttagtagagatggggttttaccatgttggccaggctggtcttgaactcctgaccttagatgatccacctgccttggccttccaaagtgctgggattacaggcgtgagccaccgtgcctggccaaaatgttaaattctttacagatatgtcaaagtcagcaataaaccatactatatagaaacaaacaaaaatttactagaaataattcagtgagccaactctttgtatcagtcattatttattattattattattattattactattttgagacagggtctcattcccattgcccagactggagtgcagtggtgtgatcactactcactacagcctcaacttcttgggctcaagtgattctctcacctcagcttcccaactagctgagactacaggcacccggctactttttgtattttcagtagagacggggtttcaccacgttgcccaggctggtctcaagtgacccactgcctcagcttcccaaagtgcatagtcatttttaaagtacagtttagggataatgtattatttctattagagttataactttaagctgggagatgttcagtaactaagtttgtgaagctattagaatgtttaagtgcatttggtttgctatgagcttgatttattaaaaggataagagtaatttaagtgtttgacaagtctggctgtctgttttgcaaatgtttcctgtcaggtatttgaaatgcttaaaaagaaaaatgaagacattaaattataatcaaacgttaaaaacataaagggaatttaactttaataaaaagcctatcaacaatgatacatctacaaagaggcagacattccaagttgggaagatggggaggttacttacccgtgctgctcccgaaccaattaactagcagaacttgttttcaaacaataagatacaacctggtacagaatgttccaacgcggtgggggagggatcacgtttgccgatgaggactgcaatgttgggactaaaaccgtgtgtgaaacctgaacggccccaaaatcatctgttcccttctcatctctcccagaagtgtccgtgacagtcgctgtcatggaagtcacctccccagcaccacaagggagagccatccttcctgcagggcggccacgtggccacctaggctggtcccgggagaccttggacccaggctggtgcctgccccagctcctgtcccgagacgtggctgaaggtgagcatctcacccaggctgggcagcagtgtccaccctgggacttttgggactgatgaagacagtcaagtccatccccatgaaaacagagagggctgcttttccagcagaatagaaatcaccaaactcaatcctagaagaactggaatattcgaatagtccgccttccacaggagaaattagaaaggtgatggatatttatctttaaggaaagtgcagaccagttgaattttatttaacctttaaaaagataattctaacttttctaggccacagaaaaagatgggaaacctcctatttatgaaggcatagcttttgtcaagggagcatatagggccaggtgcggtggctcaagcctgtaatcccagcactttgggaggccgaggcgggtggatcagctgaggtcaggagtttgagaccagcctgaccaacatggagaaaccctgtcactactaaaaatacaaaattagccaggtgtggtggcatgtgcctgtaatcccagctactcaggaggctgaggcaggagaattacttgaacctgggaggcagaggttgcggttagccaagattgcaccacttcactccagactgggcaaaaggagcgaaactccatttcaaaacaaaaaaaggtggtgggggggagcatataaaatgataaagctatgttgcttgtacctatagatgcaaacagtttggataaaatattagcaaaaatatactaccaatgtgtcaaaatcatcacacaccacccccaagcaggtggtttattttagaaatgcaaagatggttcaggaacaggacatctatcagcatgaaaaagaaattagtggacaaggagcagtggctcgcacctgtaatcccagcactttgggaggccgaggcgggtggatcacctgaggtcaggagtttgagaccagcctggccaacatagtgaaaccccgtctctactaaaaatacaaaaattagccaggtgtgttgacgggtgcctgtaatcccaggtacttgggaggctgaggcaggagaatcacttgaacccgggaggcagaggttgcagtgagccgagatcacgccacttcactccagcctgggtgacagagtgagactctgtctcaaaaaaaaaaaaaaaagaaagaaattagtgaaagaagaaagatgcagataactcaggcttagcaatccttacgcagctgctcctgggtggcctgagggcaactggaaagggagctgggcccagccagctgcagaatgaccaggagctcagcccgacacagcctcaccaaggtgggcctggcatgcagcaggggctgcacgaaggcctggggaggggagggtctgtccggcctccgaagggaccctgagagtcctgggcaatagaaagttctgggcattgagttgttagagggaccaaaaggtggggaaagagcgtgtctgtggttgggatgtgtgggctgcaggccacagccagcaaactcctccgtgcagatgctgacagggagcgtgtcagcagggtgatctgtgatcccaaaccaggcctggagcagtggcccccgggtggcccgccagcctcggactctggcctcatccctcctccctgctcctctcaggggctggacactgcctccttcccctctggccccctctgatccagcctccaggggtggggacctcagccagctgatgtccaggtgtcctgggaaagtggccctagccacagattcacactcctgaggcaggcttcggatgggcccacctgggacccatgctcacctctgtcagaggtcagggcccggtgtcccgtggacaggagggcagatgcagagaataccctccccacccctcatcctttctcggcctctcagcataggccggcagatgtcatgccaggcacggtgggtgaggaccacatcagccaaggctatgctctggtagggcctaaacgctgcgggatgctttacgcctgcttggtgttcacgatcgtcgtgaaacaaagccaaggagctcatgcctgtggggaccctcccctagggtcacgggtctaccccgatcttagtcctcgcgccagcctgtggagggagtgctctgatttcagatgggaaatcgaggcagggaacggctgtgcagctcacccagggccaggctcgggccagtgctcctgtccggggagaggcaccatcctgggtctggcttgtcatgctgcattcatcacgcgtgtctgcagccgcatttgtcgtgcatgtctgtgtggatatggctcctccaggtccaaggagcaggagcagagcaggccccggggggcaggaagctccgtccccactgccccacgcacagtgcagaggacccgtaggtggccacagaggtctccgctagttgaggccggcatggcttgtcctcctgcaaaggtccagccccgagggtgggcgctcggggccataggcagcgagggcagttctggtggatcctggggcttggcatctcggggcaggcaggggcttgcagaagagaagccaaggtcactgctggggaagcagccggcaccaggggccactgcctgacgcaccattgcaagcagggtgtggggctgtccaccacccccaaaagaccgccagcatgccccctgcctccagcaccaccctccccatccacagcctctgtgctggtcccggccgctggccaggctggcattggcccctggagctggtgggagagggtcctgtgtctcaggctgccctccgctgtcttcagggctcagagactgggatgagtggcctttgtaccaggtgctgggggctgacagcaatgagggccaggctccagcatcaccaggactcgcctctttgggtaaaacactttctccaaagggccccgtggcagatgcagcaggtggagcagaagcccccacacctggggtctggcagggaggggcctcactggggtttcccagacactggtgcggacggggctgcttcagtgggaggtgagtgaccaggaggaggaggggcgctgggacccgcagcccctaccatgaaggctgagcgacaaggggaggcagggccccagcagggcacccggagggcacgggggacacagagaccacagaaagctgagggacagttcctggccagggcgtcctctccccaggtaggaagagccttccctgacctggacagtggcagcccctggagggggcagctgtgggcaggggctggaagcctgggcaggggccaggatgaagtggggccaaggccaaggccagcaccggaggagcccgttcccaaagggcagggcctggcccagccccgtggcttcgctgtgatggagtaaaagacacaaagtcccccatggggtttcccggggctgcttccaccccagtacccccaggcagctgcaaaactaacttggcaaacaccatctgccgaaagagtaagtaggagttcaaccacagcggagtgaaaaggaggagaggctggaaaaacccactctccctgttcaacagggaaagtcccagctgaatcacactgattattcatgaggaagaaaaggaaaactggcagagctataaaaatattctgttttatcaaatcaggaaaacacagtactcaacctgcggattaaaaacactttctgaaggaagaaagaatacatttaggcgctagtttcactggaaaaattcaggaaatcattaagtgtaggcactgggtgctgagatgtcagatgaaatagatgggaatggaacaggagctggtgagatgtcagatgaaatagatgggaatggaacaggagctggtgagatgtcagatgaaatagatgggaatggaacaggagctggtgagacgtcagatgaaatagacggggatggaacaggagctggtgagatggcagatgaaatagacaggaatagaacaggagctggtgagacatcagatgaaatagatggggatggaacaggagctggtgagacatcagatgaaatagacgggaatggaacaggagctggtgacacatcagatgaaatagatgaaatagacaggaatagaacaggagctggtgagatgtcagatgaaataggaatggaacaggagctggtgagaggtcagatgaaatagacgaggatggaacaggagctggtgagatgtcagatgaaatagacgggaatagacagggatggaacaggagctggtgagatgtcagatgaaatagatgggaatggaacaggagctggtgagatgtcagatgaaatagatgggaatggaacaggagctggtgagatgtcagatgaaatagatgaaatagatgggaatggaacaggagctggtgagacgtcagatgaaatagatgaaatagctggggatggaacaggagctggtgagatgtcagatgaaatagatgaaatagatgaaatagctggggatggaacaggagctggtgagatgtcagatgaaatagatgggaatggaacaggagctggtgagatgtcagatgaaatagatgaaatagctggggatggaacaggagctggtgagatgtcagatgaaatagatgaaatagatgaaatagctggggatggaacaggagctggtgagacatcagatgaaatagacaaggatggaacaggagctggtgagacgtcagatgaaatagttgaaatagatggggatggaacaggagctggtgaggagtcagatgaatagacgggaatggaacaggagctggtgagacgttagatgaaatagatgaaatagatgaaatagctggggatggaacaggagctggtgagatgttagatgaaatagatgaaatagctggggatggaacaggagctggtgagacatcagatgaaatagacggggatggaacaggagctggtgagacatcagatgaaatagacggggatggaacaggagctggtgagacatcagatgaaatagacgggaatggaacaggagctggtgagatgtcagatgaaatagacggggatggaacaggagctggtgagaagtcagatgacatagacggggatggaacaggagctggtgagacatcagatgaaatagacgggaatggagcaggagctggtgagaagtcagatgaaatagatgaaatagacagggatggaacaggagctggtgagaaatcagatgaaatagacaaggatggaacaggagctggtgagacatcagatgaaatagacgggaatggaacaggagctggtgagacgtcagatgaaatagacaggaatggaacaggaggtggtgaggagtcagatgaaatagatgaaatagatgcggatggaacaggagctggtgagaggaaatatatgggaatggaacaggagctggtgggacatcagatgaaacagacgggaatggaacaggagctggtggatgggcatgaattagctgagggcaggtgtgaggaggtgatctcaggagagacccagcggcagctttcaaggcactgggagctgaaggaacagcacccacaagcacagagccggaccaggaggccgagacacaggcggcggcagccccacgccccacaccccatgccccagggaggaggaaggcagagatgaggagagagaaagcagacatggaggacggaagccagaaacctgctgggcgaaggagcaattttccagataaagaaactcgaacaaccggaacggtgcagccatagagtatgtaagagaaggaacttctagaatgaagacagatctgaatctatttaatcaaacggctcacggggacaagcaaaattaatgaaaatgaatctggtggaaatcttccacttcaagcataaaacaccagacaagcacagagagaaactgagtagcccagcagcatcctgtgccaggagaccacggagaccacagggcgacagctggagcttcatggctgcaaacccaccaatgccaggagaccatggggcgacagctggagcttcatggctgcaaacccaccaacgccaggagaccatggggtgatgtctggagtctcacagctgcaaacccagacttctgtgcttggccgggtcactatagggagacccgctgcaccagtccaggcaacagaaaaaacattctcagctacatagaggccagaaattgcaccaagaacatttccttcccgaaaaagcaactcaaaattaattatttgaggcaaacaagaggtgactccaaacaaagacccataaacagggaagggcaggcaggcagtggtggccggggacatggagatggcttgagctagaattgagtccacgtggattttgtgaataaaatctaagaattgcaaaataacaatcactaaaacttaaaaccaccttatcagggatgacggctctttgggggtcttgtagtgaggccaagatagacttcaggatcgaggttctaccagtgatttaaaattaggatgttgaaatttggcagaatgacttaagttttagaaaaaaaggaaattgggtcattctctttccaaaggaaaactgtcccgtgatggaatgcgtagtcatttgtgtctgcaacagtaagcgtctgtaacccttgggaacttcacattctcagcctcacttcatcccagagaaagtcatgggaaatgccagtcactctggaatgttcccaagtgtgcagaaactgagaggcctcccaccaggctcacctggcctccttccccagctgcttctctccccatctcactgctctactgagcactaggggcttccagacctccctccagcctctgagctgctgtgagtcccactgaggcagggcaggggcaggggcagcctcgtggctgtcctgggtgtcatgaaaggcggtttggtgaagctgttggtaacaaaatccaaatgccaggatggaagagcgatatggtgtcgccagatggcaaggcagaccctaggccagctggccccggcccacccgtcactgtgagcactggcatagtcaccctgaacgtgaaaggaggcaattccctgcccggctctggagtcgggctgcccagacagctgggctggctctgccgttgggctgggcctcagtttcctcactgcagagagggtgacaacacactggcccacatgtgagggagtgggacatgtgagccggcagaggggaggttcgctcatgaatgcttacttaccaaggcctcctccattccaggcacctgcccaaacatggcccttgcacgcctcccgggaccccacatctacacccagtgacggtcccatccttatgctccagatgaggaaactgaggcacagtgctggaacccaaagccttctagtttgggctccacaaaaggccttttgattgaattatgcttgaaaaggcaggtttctccggcaagaacgagtgggaaccacacccagtctgaggcttcgtgcctcaccgctgcccctggtcctgcagctgcctggtgccaccacccagggccacggctcctccagggcccactccttcctctgttcaggagattgctctcttcacgttagtgcatgaatcccatcctgggtcatggagccagcatggctggagctcagagcccaaacgcagctgaagacaagatggctcaggcgggagccccgcagagctcatccccgtccatccaggctacagtgggggttgggtggggacatttctagggggtgggtccgagagaagcatgaggacctaaccccacgacccccagaaaccaaactggctctcttggtacagcgctagtctgtggagtgggcccattcccatggtgtaaacacccccactgatgctggcttccagctgctgacgtgctgtcactgaatgtggagccgggaagcattgttcccttttggcttttgagacatgccaggcccagtggaccacttcaggctgcaacacatgcagggcagggtgtgggccagggcatggcctgagtcctcagtgccagggcatcggaacacctgggagtcccttgaggataaaaaaggagacccaagccaatgaaatggacacacagcccctgcaaactgaaggtccgtcttcatgaacttgatgatcatctgtggtgttgggtgatttttgtttgtttgagacagtctcactctgtcactggggttggagtgcagtggcacgatctcggctcactacaacctctacctcctggttcaagtgattctcctgcctcagcctcccaagtagctcggattacaggtgcatgccaccataccaactaattttttatagttttcggtagagatggggtttcaccatgttggccaggctggtctcaaactcctgacctcaattgatccacccgcctcagcctcccaaaatgctgggattacaggtgtgagccactgcacctagcctgggtaatctatttcaatttaacaaaccagcccaacactgcatggctttaaacagtaatagccgtttctttaactcacgcatgtgcagtttgggcagggctcagcagggctggctcatctcctctccgtggaggcctggggctgggagccctgcaggctcagctcggattcatggggatggacattcaagctgcaggattcaccaggaaccttacccttatcagtgaagactgagttcacctctgaaaagagggagccacatggctggagtttgaccaccagacattcctgggcagaactttgggtctggagcaagtgacccagaagcagggacagtctgggctgtaccagcagctgcctcacagccaggctgccctcttggcctccctggacctgcctatgcccagccctcattctccagccttctgtctggtttccagagccccaagagccctctgagaaagttatttagcataggtttccattcattgcaaccaagatcctgagtgcttgtatgatacagcagatatggttaaattaaaaaaaaaaaaaaagaaaggaaaaagcagagagaggtgtttgtgcaacaggactatgctgcagaaaagttgcatggagaagctctggcagagtgggcaggcaggggctgctgggaggggcctccggctctatggctgagcagaccataaggaacctggttttcccagggctggccggcaggccgttctcagctcctctgcctccactcaggggagggtgggcagacgagtgggcaggtggggaaccatggctccactggctccttggggcagcccctgttgggccctgtccttaccctcagagaacacgctgcctgcaccaccccatgaaggggggtccacgagggttagggctacaatgcacttggtgacatcaggaccatggcaaggtgtggagggggtggactctgatctggatgccactgagctcatcccatggccccagcctcagggaggggctggagagcgtccattggggcatggtgtggacctggacggtagcctgggcactggaatcctggcccttcccagacctgctgagccagcgccagcatcctaaccccagggaccccagggacgcctgtgcgcagtcgctcagagaagccccaggacgcctgttcgcagtcactcggagaagccccaggatgcctgtgcgcagtcacttggagaagtcccaggacgcttgcgcgcagtcactcggagaagccccaggacccctgtgcacagtcactcggagaagccccaagctgactcaactctgtcgaaacgactgttgtaagcagatcttggaggtcgcccgtggtctctgcctccagtgttactcccaagacggctgtgttgtgtggcagagggattctgaaggcatggtgaagttcaccaacccgctgaccttaaaacagggaggtgcctccgggcctgacctcatcacaccaacactttagaagcggagtttcctctggcgggtgcagaagggatggccagaaagagccactcatggggggactccaccggcccctgctgcttgaagatggaggggccaccagaggccaccaggcagggacccgagagaaagccctaggagctgagggcagtccctgacaacagctgcgagaaaacggggacctcagtcccacacccacaaggacctggattctgaaccagcctgggaggaggcctgagccccaggtgaggccccagcaggggacccaggccggctcctgacctgcaggtgtgagctacaagatggtgcaggcttgtccatttatttacttatttgtatggtagtaaaacacacataacataacattgcccacctgaactattttaaagagtccaattcagccacattccgtgcactcacactgttgtgcagacactgcctcaagcaagctccagaactcgttcatcttcccaaacggagacccatcagcagccggtcccttccctctgccctcaggccctggaagccacgaatccacttcatctcctgggtttctctactctagacactttacatcagtgcaagctttttatataaacgcagtcacttagcaccatgtttctgaggctcacccacgccataatgtgtaagggagcttcaccctttttctggctgcacaatactccgtcgtgcgtgcgccgtggcctgttgatctgttcctcggtccacggacacttgggttgtttccaccttctagctactgtgaataacgctgctgtgaacactcatgtccgagtttttgctcagacacccgtcttcatttctggctgtgcatccccaggtgtggaactgcagggtgctatggcaattgtttagctttgcgaggaatcaccagaccatttcccacagcagctgcaccatttcacactcccaacaggaatgtgtgccgagcgggtgctgtttcaagctgctaagtttctggtaagtagaaaacagaaaacgaacacagggactggccagagggctgggaacaggaggcagggtggcagcaaggtggcagcaggggggtggcgagggggggcagcagggtggtggcagggctctcctccctggcctctcagcccagctcccaaactccaggtatcctcaacccctcctcccagcctcagccccagctccacatctcagctcccagcctcagctccagtggcctcagctcttgctcccagcctcagctagcaacctcacctcctgctcccggcctcagctcctggactcagctccagcttgcagatggattcagaaaggccccagggccttacagcaatgccccaagaccatgcagctgcagggggtctgattggcaggccccaggaggactgcagatggggcggaggtctaagccccccactcagctaagtggggcatacgccagggcaggaaggacacctgaacgcccacgtccgggtgttgagaagggcagaggcctggacaacgtgagtgagagggcgcgcgggcaccagatgtccgatgaggccaagggcctgctgtatccctgtgctgggggaacagcgcctcccaaaatcaggtcccctggaacccaagaaggcgactttatttggaaataaatctttgcagctgtgattagtggagaacgagatgaggtcatcctggagaggccctcgccgtagcaggtgtccttcgagaagagaaggggaggcggcctgatgacagaggcggggccggcgcgatgctcccacaagccaaggaaccccaaggagtgcccgtgacaccagcagccggacaaggagggctcaggaccaagagtgaccgcggccctcacaggccgatctgccttccagcctccagctctgcgagacgaggcattcctgtagctttaagcccctcgtctgtaggacactcacccccaagtaaaggcccagccacgatgggaggggagcgtgaggctgtagccctggggaaagctgtccttggtcttccagaggcgaggagctgcggaaccccctgcgggacactcagctccgcccagaacacctgggcttctccatttcctcttggcaagtccctcggtgtttactttctcccagtccagggaaactccacgcccagggcttcaggactcgggtcaggagaatattccccctgcggccaaccgcaggcacggggaggaagtgagcctgacctttctcaggtccaaaggtccctgagctcatgcagccccgcacagggagggaggaaggtggctctgccctgctcctgacctgagacaccagggccacaaatcacctgtcctggggccttccaggcctcatggtcctgggcttcagggctgcccttggtttgtacttggccggtctttcgttgggttgggaatactggtagggaggtgcaggggtcccaggcagaaaccgacaagaaacctgtggtcgccagaccttcttggcacctgtcaccaggtcacatctgatttgctgagccccatggcagagtccagatgaaaatgccggctgggcatggtggctcacgcctgtaatcccagcactttgggagaacgaggcaggaggctcacttaaggccaggagttcgaaatcagcctggccatcatggtgaaaccccatctctactaaaaatacaaaaattagctgggcgtggtggtgcgtacccctagtcccaggtactcaggaggctgaggcacgagaattgcttgaacctgggaggtggaggttacaataagccgagatcacgccactgcactccagcctgggcgatagagcaagactctgtcaaaaaaaaagaaagaaagaaaagaaaagagagagaaagaaaaaggaaggaaggaagttaggaaggaaggaaggaagggaggaaggaaggaaggaaagaaagaaaagaaaaaatgcctacctcctgggacagagtctctgtgaaatgcagcctcttccctgaactatgcacatgcccgcgcgcgcgcgcacagcaatggccgccctgcagacagccaggcctcggaagtctggacgtccgcgaggcagagaggcgggggcgggccactgacccacgcacagccggcacctgcatttcccctttcccagaaccagatggggcaggggaagtggggtgggggtttcagttcctcttgacctcatcaagacactgttgtctagaaccttctttctgcccatcacggtaattggagatactgctaactagctcccacctctgcctgcccgcttcatgcctgccatccttggcatccctacttaaaaaaaagctctccatttttgcaggaaacccgagtgaaggctgagtgccccatgagggacccgggctctgacacagacagactgtcccggctggagtccagctcctggacgacctgggtctccccgttctgcactggtatcgcgcggtgaggcggcgctgatcagaacctcaaaagacctgaccccgaacaccgtcatcccaaatcctgagctcctgaaagatcaaaacctaacatgttggtgttctgaccagtttctctgtgaatggttcatctgcacataactcatatccacgtgactgaatgagcacacctgtgtgtctgtgctggagaaaatgttatgatcaccgactttattgggtaaagtcgcctatgaggggtgctgtcgtgtttttcagtttctcaaatcccccttaaaatataaataaataaatgtattttatttatttatttatttatttttcttttttgagacagagtcgctctgttgcccaggctggagtgcagtggcacaatctcggctcagggcaacctccacctcccaggttcaagcgattctcctgcctcagcctcccgagtagctgggactacaggcgcccgccaccacacccggctaattttttgtatttttagtggagacggagtttcactgtgttagccaggatggtcttgatctcctgacctcgtgatccacccgcctcggcctctcaaagtgctgggattacaggcatgagccaccgcgcccggccaaacaaatgtcttttacagaatgttttcgaattagtttttccagaattataattttgggattttgatctttcaggatgtcagcattcagaactgtgtcccaggatcgtggcccagacccacagggcaggggcgtgcacttttgagggttctgaagacgactcaacagggtgcctgacctgctggtaaggactcaggagacctcacctgtcctcgtcacactcatggaaggggactccagatccctggcgtagctggtctgggaactggggagggatgggcagtgcccggtatagggtgcaacctccagtgcccacattagcacgtctgttgctgtgagattctatcctgtggacacctgtggctgtaacacacaccttcccactgctgtcacaggagtgatactctttccgattctaacatcagtgtgtgcacattttgggaaaaccagcaagtacagaagaagaatttaggccgggcccagtggctcacgcctggaatcccagcacttcgggaagtcaaggcaggaggatcgctggaggccaggagtttgagatcagcccgggcaacatagtgagacctcatctctatttaagaaagaaaaagaccactggtcctcccagtgtttacaagatttttccattaaaacaggagggatcataatgagcggcctaacaaagacatttaaagacacgccaagaaggggcgcagacaggagtcctgagatgcagtcatgggaacccgcacctgttttcccgccctgggcacccagcgtggacaggctggccggtgccagggtgagcagggcaggctgaggtctccagtgggtggggacaggttagggggcagcaattcagtgaccctgtccaggactgggtcccttgcagaaggtgaggtcagccaggggtgggggtggtggctgtggaatccgttgtctggtctatagggggtccccctaccgaagccctaaccctctccccttcaccaccccagtgatctcctggcccaggctgctgcctccagcagctccccagcccccaggacagtccttcaggactctagggggagtcccgtctacaaggacggctcaccagtctcccgccacagccagtgaggatggggtcctgcagccgaagtggtgtgtgcccagtgtggtgtccctggcaggctgggagggtgcccccagctgccagttagtgaggctgggttagcacgagggcaaggagcttggattctggggctgacagcctgagctcaactccagcgccccatcttgctggggctcctccgcctggaggcggctcctccacctgcctctgcctccgtttctgcagcagttgcctgccggactccagcccgaggcgggggccacggctgacccagctggagaacgccccactggcccagtcagtgctgtcctctgcacctgatggcttctcttggcagggagggctcccccgcccccgggctctgtgccagccagaggttccgcaggagctgctcacttcctcccgccggcagaggcagcctgcggggcggctccaacctggagaaaccaaaatcagggcaagtccctggctgcttccctggaaagccccgacggagtccccgctccttcccgccggttctcagggtgctttatttcagaaggggatttcttcctcctgagaatctgatggccacagggtgcctgtcacatgtccacatcgggccctcctggctgtcaccaacttgtccaactgtcagaggtgtttgaaccagagcgactccgtcttgaataggggctgggtggaatgaggctggggcctgctggactgcgttcccgggagggtaaggcattcttagtcacaagacaggaggttggcacaagatacaagtcacgaagaccttgccgataaagcaggttgcagtaaagaagtggccaaatcccaccaaaaccaagatggtgactagagtgacctctggtcgtgctcgccactcattatacacaaattctaatgcattagctgctaagagacactcccaccagcgccatgtccacaaatgccatggcaacgtccgaaagttaccctgcacggtctaaaaaggagaggaagcctcagttctgggaattgaccaccctttcccagaaaattcatgaataatccactccttgtttaacatataatcaagaaatgaccaaaataagcataagaatattcagctgagcagcccagccctccgcactgcctctggagtagccattctttattcctttactctattaataaacttctcacttgactctctggactcaccctgaactccttcctgtgtgaggtccaagaaccctctcttggtgtctggatcaggactcctttctggtaacacaagcacacagagacgtctccagggagtgggagggcccactgagcaggccgcagaggcagaggctgagcgccatcccacacactcatcaccaggggacgggccacccacaccacaccggcagccccctcatacccccatgctccagcccagaaggctgccctgggccggctctctatgctgcctcgatttccccctttctaggccttgcttgggatgaaggtcactgcacaccagatgtctgcacgtaccggagcagagcggggccgcctggagccccttcccaccaaccagagctgcggccaggcagggtggaaatgcaggctgtggggagacgaaggtcaagtcccagaacatggacgtgtcccgggctcctggctggtgggggcctggtccctggcggggagaggcagcagtgcaggagccagggctgtctgcagggaaccagccaggtgggcttgggggtcacagggtccctcaggcctctgctttgctctctgctctctctcttcctcggaagaagtctgtgctgttggtcacttcgctttcattcaacaagcacagagggagcacctgctcgggccaggccctgggctggaaccacgtgggcgagtccctgcaccctggagctaaggttctggggagaggagaccgggaggcaggcggtgcccgtgtgtgcgcgggtgagaagcctcagggagcgtgcggccgaggaggagccgcctcagcagatctcgggaagaactttccaggcagaacggtccgtgcaaagaccctggggcagaggtgctcagacacagccagggggctgagggcagaggtctggggtcaagctggggctggagggtgggaggggtccccgggagggggtgtcctggctcctggtggctcttctagggcagggacctgggctgctccactttcacactcctggggtttccccgggagccttctctgtggcaagaagcctgtcctggaaagtcccggaccacaagtcaacaaggaaaggtcagctctgggctatggccgggccaggccaggcctgtgccctgtggtgctcccgaggacggggccagcgaccctgtgtcctgctccagcccctctgtgggtgcaggaggttgggggctgccctcccaggaaataccactgaggcctcggctctcaggctgcccacagggcctctcccactgaggcagcgggggcagcagggccacagcccccgcttaccccctacccaagccctctgcccttaggcgtgcagccacacccaagagtgtcaggcctggggtcctgggtgtggagctgaggggcctgggcagggcagatgggggaaactgggggtccaggttacagcaggctgggagggtgagaggtggcctgagcaccagtggccctctgggatgtgacatttactctgagggtgagaggagaggccgggaacagagagggcaatgagcagggaggcagaggcggcagagacgtgcagaagcaggagaactgggcagagcacctaacccgctccgctccgtcccgtagcctctcccctccaggcacaatctgccttcctcctccaggcacaagagagttggccaacgcctcctggggcaaagtccccaggtgaagagcggctgctctaaggtttaacctccaggttatcacaaacccagggaggggaaggagggacaagttgttataaaagacaaaccccggtggcaggacatcctcccagcagagtcagtgccactctaacaagctggggcacgattccagaaaggcaaggcgtggcaccgagtgagggcacctgggacatccgagcgcgagtgggaggctagatgctgtgtggagttttccgaaggccttgttgtgatggcggcgacgcggggagtgtcctcattcccagaagtttgctgattgatgtttttagggccagtgttcaaatgtctgcaacttgtgttcaaaaatggcgcatgaaaaaataatgcgaatggaacacggatcctgaaagaggttgggtgcctttcaagcgtttcctgaggggacgggctgggcgtccacactcttattctttacacttttctacgtacatcacagttttcacaacacgcacacatcgggatggctattatcaaaacacagaaaatcacaagtgcgggcaaggatgtggagaaccagaccccttgggtgctgctggcaggagtgtaaaacagtgctgccaccgtgggaagcaggatggcagtccctaaaacaattcaaatagaactgccaggccaggggcggtggctggcacctgtaatcccagcactttgggggccgaggcaggaggatcacttgaagccaggagttcgcaaccagccggggcaaaatggcaaaattctgtctctacaaaaaaatgaaaacttaaccagccatggtgatggccaccggtagtcccagctacgtgggaggctgggctgggaggcttgcttgagcccaggagacccaggttcccgtgagctatgatcatgcagctgcactttagctgaattcttcagcagaaataaaaacttcggtcacactggtgtatactgtcttattctgtgccccttaagaaaggtttgattccctaattcctttttatacactagttttttttcaaaagtgtttgcagggttagatcgcgtctctcgtctccacactgcaggtaactgggtagaaactctgccctcatgcatcagacacgctcctggttccctgcaatcggacctgtcactacaaacagaccaagctttccagatgccagtggtggtgggaaagctgacaacactccctacagcaggatgacggaggacacagcctgctctataacgtcaaagtggcctctgggtcctcgtcccagggcagaaacagactcctaagtgtgaacggaaaacagaggattattaaaattgtcacctaatgcagaagccctgctacgcccttaggtggtcaaggctgatttcttacccatccacgaccgcaaaggaaaccgttctttgttggggtcgaagagcatgaaccctctttagaatggatagtgttggccaggcacggtggctcacgcctataatcccagcactttgggaggccgaggcgggccgatcacctgaggtcaggagttcaagaccagcctggccaatatgatgaaaccccgtctccactaaaaatacaaaaattagccgggcatggtggcatgtgactgtagtcccagctactcaggaggctgagacaggagaattgcttgaacctgggaggaggagcttgcagtgagccgagatcgagccactgcactccagcctgtgtgtcagagtgagacatcatctcaaaaacaaaacaaaacaaaaaaaccaagatggatcgtgtccatgtctgcaccaccacacatcaaacaatccaacaggtggaactgtgcagacttccccacactcaatgtcctctttccaatgtcgctgttcgctatctgtggatgtccctaaatggcctcagaagtttccattagaagaaattagagatattgtaggttttaagtcattgagcaatcacttactaattacaagtcacttatttattagacaaaaatgaacattttatgtgcacaaagatagtatcataagaggtgtggcgttttgccattggaacctgggcatacggtcatttgtcctgcagtttctcgtgtactgaaaggtggcgtggatcctacagtttctcgtgtactgaaaagcggtgtggatcctacagcttctctactgaaaggtggcgtggatcctacagcttctcgtgtacggaaaggcggcgtggatcctacagcttctctactgaaaggtggcgtggatcctacagcttctcgtgtacggaaaggcggcgtggatcctacagcttcttgtgtacggaaaggcggtgtggatcctacagcttctctactgaaaggtggcgtggatcctacagtttctcatgtacggaaaggcggcgtggatcctcagcttctcgtgtaccgaaaggcggcgtggagcagcacaaggagcttgagcgttgcaatgagaagtcatggctgtgaatcccaccccatcacgttttgaatgttgggcaaattaattaatcgttttatccacttactaggcgatgtatagtttgtatacttcatgccagtcattgttttagactcttaggatgcaaagataaataagaaagttgctttgggcaaagagtgagacctttttcttaaaaaaacaaaacaaaagaattaccatgtgatgagcacttctccttctgggtgcatacccagtgctctgagctacagcgtctaacgttcaagccagcttctcaatcggaccccaggatcctttctagagagaaatcctgtccacgtcgccctcctagctggcacggctgcaggcaccagtgtcgtggcagcgggaaggggaggacgggcttggtgaaaggggactggggcctcctcactcctggggctgccagctccctcaccctgaaatcagacccacgcccgccctgcacttcctgagtgtttcctgagaccaagggatcagagcttcggctgtgaggggcggtgctgtgccctgggacacacggagccacagcctccgcttccagggtgccctggggcctctctccacgtctccctaggggcaaccgccacaactactctgtgtcgtgtgtcctgcgccgtccatccgacccctcgcaactcatcccaagcctggggggctctgggggacagggcaggtggggccatgtgaccaggagaacctgctggtgtctccggcctccactgggtgccccaggactgtggtcagcagggtggagcccctgatgcagcttcactgcctgctgcagccagagggggacggggtcccacccacagcccctcctccggagcccccagctctcccctccgaatctctccacccaccgcacccctgagcgtgaggggcactggggtctcctcccggaagtgggggtcccgcctggcccctgaagccctggggaagggtttctgtggagctgctcatggtccctgcctgtcctgcccccgggcccagggcctggctccaccgccccggcatgtcattcccgggggtgggggcggcaccacggagaagtcagactccggctgggctggcaacaagggtggggtcagaggagccccgtggcgctgtggagggtgaccgggtgccagggtcccgggagctgcagggtttggggctgaggcgcaggatgaggccgacacaggggtcctggggcgcgggcggtccgagccgtcccctcaccgcccagcctcgtaggggcccgctgtgggccaactgcagcaggagctggggacacagccgtctcacacctgcctcctggtgcgtttctggggctcagggataggcgtcctcactcaggacacacaggactggtctggccgtggggtcaggccaggaggcatcccctttgcacctcctcacacccctgtggggaggggagggccctgggaacccatagacgcctgccccacagcagctgaggtcccgcagcagccagcagggctgggccacttgaggcctccggctctgatcgcccagagggcgcacggggtttggtgcagcctctgatgggcacgaggcggccgcacgggatgagcacagtgggcgtcccttccccatggccaggactccaggctggaatgtggaggttcccgaaacccacactggaaggcaccccatggatatgctggggactggggccgagaagagggcactgcaggcacgcggtggggtggcctcccaacgcccaactctcctgcacaccccagcccctcccgcaggcctgggcatggaagtgagcccggggcgggttcaggcagcagtcagggcctttgtttcagtgccgtaagctggccaagttcaacatccagggggataaacaaaggtcctgcacacggcctgcactgggcgggagcagctccagagaacctgcctgggccagggctgcccacagcgcgggggcagcatctgtgggcacacccggaccctgggtgaccagtgtgggggcctctctgcatgctcaggcaggtgcagacaaggccgcggcctgggcagccatctgcctgtcactgcctgggcagccatctgcctgtcactgcctggccagtcatctgcctgtcactgcgtctcaacaactggtgccacaattctgtgctgacaacaatctccacgctgcagccaccgcccgccccacaggcccctcaccctcaggccacccgcccgccccacaggcccctcaccctcaagccacccgcctgccacacaggcccctcaccctcaggccacccgcctgctacacaggcccctcaccctcaggccacccgcctgccacacaggcccctcaccctcaggccacccgcctgctacacaggcccctcaccctcaggccacccgcctgccacacaggcccctcaccctcatgccacccgcctgccacacaggcccctccacctgagacgccagcaaaggaggccgagaggagaaagccccaggccggcttcccggctgccactccccgcaccccgtgccagttgaactcctgaggcttcagggtccagcctctctgcaacctcggctccaccccgccctccccatgccttcagattcctccgctggctctgaatggggtgctgggagggcccctccttctgcagctcaacagccacgtgaagccctcgctgctccaggaaacggggccccgaaggctggcccacggagatggaggcaggcacccgccatcctcagcaccaggaccacgggttccatcctggctgcacaccgcgctccctggagagctgtaatgtgtcccgatgcccaggccaccgcctagccagtccaccctggacagtggggagcggggtccccgcatcagcacttctgaaggttcctgggtgacctcaaggtgcagcgggagagatactcaccactcatgggtggtccccggcccagtgctccccggagctggggaggggctccatctcagccacccagaccgagggacccatgtctgcacccacaggaccccaggggctccctgtgcttgccaggtgcagccacagtgcgcagcgaggactcagcgagggacaggtagcagcaaggccagctttaactcgaaggggcccagcccaagctgccaggtgtctgggtccccgatcagggtctgtatcagctcccattgctggcactgccaatcatcacacagcagagggcttaaaaggacagtttattccctcatggttctggggccaggagcctgaggtcaagcgtggggaggcagtggctctggggatccgccctgcacctccctcctgtcacagtcctgcccttctcagcccatggacgtgccctccacctctgctggtctccctccaggacacgccactggactcagggcccacgcaggcaacctggggtgaccttatcttgaatcttgagatccttaactcgatcacatctgcaaaggccttcccgaggttccaggtggacgcgtcccttcccgaggttccaggcggacgcgtcccttcccgaggttccaggcggacgcatcccttcccgaggttccaggcggacgcgtcccttcccgaggttccaggcggacgcgtcccttcccgaggttccaggcggacgcgtcccttcccgaggttccaggcggacgtgtcccttcccgaggttccaggcggacgcgtcgcttcccgaggttccaggcggacgcgtcccttcccgaggttccaggcggacgtgtcccttcccgaggttctaggtggacatgtcttttgagagggcctcaggttaacccactactgtgtctgaatctgtcccttccccaagcagcagctctgtgtcccggcatggccactgtggggcagagacacagcagatcccacatctctgtgccctgcagacccgtcagccctggggatgctggtctgggacggacccctagatatcacacagccgagaggtaggtcagcgctttaagatgctgataccgctggttcagctcctggagcagaattctcagggtggatttccagcaacgcctcctgggagggtcagcaggggctggggtccgtggggtggtctccgggaggtttgcctgtgtcaggcctgtgctgcttctggcggaggcgcttgtccagcctcatccagcctggtgtctccggtgccacgcgctaacaccttcagtgcacgctcgggaacgcgcctggaaggccctgccctgccccgccccaggctccagccagatgctgccagcacccgggccctaggctatgccagtcccacaggacttgggtgaaagtgggtcccagaggcagggcagaggggagctcctgtctgggggcgcatgctgggcacctgatctatacccagaagcccatagggagcagggtccacagggctggcgatgccgctcccaggaagcctttgtgggctcagacacaggacccaacagccctgcaacagtgcctggagccagacgttcaccccagatccttctgtggggtgagactgcaggtcaggccgaggcgtgtcagccagggtggtgtgactgcacctccagagccagcagcaacggccaggctcagattaacgttcagaaactctggcacctccagagccagcagcaacggccaggctcagatagaacatttagaaagaactctggcgggcaaccgtgggtggcagagtcacagctaattcacaatttacagccaagactgtccctgatccagtctagagagaacctgttaaggaaaaattatcctggtgcttatcgtaatggcaaggaagacttcattatggactcccgcagtgagggagagacgggctctatgttgggtgcagcaggacaaggggggttcacagccgagaagtgagggggtccgtggctggaaaatcaccaggagggtgcggcagggccggggcatcctgctgaaggcgtcgaggactgaggtctgatctgctcctggagctcagacatcggggtgggattctctctgacctgactctgggttcctgctccgttggactcggcagggttgcacatggaagcccaaggttgagtccccctcaagaagaggctccaagagtctctgccgcgcctgtgtcatttggccgcaagcacatctgtgtgggccagagtgttggggagatccacccctgctcaaagagtgggcaggggctgaagccaggaggtgggccctgcgtaggggtagcacccacgaaaacagagcgaggaggcacacgtaggctgaagcatccaggagccagggcctcaggagtgggcaacacggagagccagggaggacggtggccacctggatcccggagagccaccacgaagtatcccaaagctctgggcattgaggaagcctgatcaaggaaacccgagagaactgacatcgtcagacgcaggctggccgggctggcagtggctgaaggtctgggatggggcccctgccacgtggccaccacaggctgagcagagcccagcggggaaggacccaccagctcccctggagaccctttccacccctggctctgggggccaaccctacaaccaaagtcctgccctccccagggggccaggaccacctccctttccctgggccctgggagtggagaggaaacggcttcctttttctcccccagcccaagatctagaaaagcggggcttagccgggcacggtggctcacacctgtaatcccagcgctttgggaggccgaggccggtggatctcctgaggtcaggagttcaagaccagcctggccaacatggtgaaaccccgtctctactaaaaatacaaaaatgagctgggtgtggtagcaggcacctgtaatcccagctacttgggaggctgaggcaggagaatcccttgaacccaggaggcggaggttgcagtgagccaagattgcaccattgcactccagtctgggcaacaagagcaaaactctgtctcgaaaaaaaaaagaaaagaagaaaagaaaagcagggctcataccatatgccatgggcacctgacacacaggcccctgcctgcccagaccctccacatgtatccaggccccgagtgagtgtccagcccccccaccgtgtgtccagccccccgccacgtgtccagccccccgccacgtgtccagcccccctgccacgtgtccagccccccgccacgtgtccagcctccctgccgcgtgtccagccccctgccgcgtgtccagccccctgccgcgtgtccagcccccctgctgcgtgtccagccccctgctgtgtccagcccccctgcgtgtccagcccccgccacgtgtccagcccccgtgtccagccccccaccgcatgtccagcaccccaaccgcgtgtccggcccccccgccgcgtgtccggcccccccgcgtgtccagcccccctgccgtgtgtccagccccccaatgcgtgtccagcccccccaactgcatgtccagccccgcaccgcatgtccagtctgaagaatcccacagaagagcagcccgcatgtgggaacgcacatgcttttctataacacaacatggctacaaaatgttcacagcccttgaatctctgtcatttctcagaaaataccctagggaaaaggcctcagaggcccaaatgttcttctcaacattattttaatcaggaaatactgcaaactatcccaaagccaactaaaatggtagggcagagggaagttttctgtaaatgccactggagaaagtatcacacggccctcgcggtcccaggggctgggccagggcaggctgtggcctcccagggagttttacagatgctggatcacaggggtgggcccatgagaagcgggcggcgggctcctccgccctcagacttgcaagcacggaccacggccgcctatgctggcaagaccgcgatcatgctttttcatttctcagggttcagtaatctgcctgcatctcttctccagcagcagctgcacattacgccatggggcatcaactccgaggagcgcttggcacgcgccttcctcctcccagcctggaatcatcgcccgggcccttccctctcagggcggggacctctctagggaaaggaagggctttccagggcagcccctccagcctgcatctcctgggagggccccagagagggcactgggcagcttcacttcaaatcgggggcattggggctgagcccgaagcaggagggcagcaagggtcctgacattgtggacttggccagggaggggccagtccctctcagccacccacagctacctgtcccgagagtgtgaggattcgggtctttggtgggctctggggaaggggctgcaaggaagcgggcccagaacctggtgctgaggcccaggacccatgcagggacgtggggcaggacagagaggggcagggcaggggcagggacaggggcagggatgcgggataggacaggggtacggacagggatggggcagggacgcagggcaggacaggggcagggacggggcgggacacgggacaggacaggcgcaggggcagggcagggatgcagggcaggacagggatgagggcagggacgtggggcagggacagggacgtggggcagggacagggacatggggcaagacagggacggggcagggacgtggggcagggcagggagaggggcagggacgtggggcaggacagagaggggcagggcaggggcagggacaggggcagggacacggacagggcagggatgcggggcaagacagggagggggcagggatacgaggcaggacaaggagggggcagggactcagggcaggacagggcaggggcagaggcaggacagggacggtgcagcctccgctgctgccctctcggggagcctggctcccaccctcacccagccactgctcctgggcacagagctgaaggggaactggaggctgcggcgttcctctctccgtccccctctctctggtgactcatgtgataacgaaccgaccttttggagacattctgtgccctcaacaaaagcggcccctgtctggaaacccccccgaggagactgacttcctcccctgctgcctgggctgcggtagctcttccggcacctgctcttcaggcacctgccctgtgctggcccctcctgcaacaatcgggtaaggggacccaggaccacagggaggctccagggagccccgtgggtgcctccagcagccgtcgggggtctctgtccctcacacctcatctgtgagggtcccttggcaaggcagcccctcccgcttgcccagggtggcaggccggctgcccgcatgcagaggctgctgggagggtcccctcatgctctcccctccccgtcccctgcctacccagccagggctctcgctcccagcagccaacggtacagcccgcctcggtctctggggtgctagatacactctgcctggagcccaggtactggaacctctgtgcctgggccatggggggcagattaagggaggccctgcccctggagcgcaggtactggaacctctgtgccagggccatagggggtgggttaagggaggccctgccctgcccctcacctgtcccctcatctgcacatccctccttcgtgtcacctgcacaggagccctcacctcagtcggcgctgcagaaccagcccaggagagcagctggcctgtcatctgctgaggagcggaggcgtgcggggatccggaggggaagggggtctggagtgctccgggggagaccctcagggactgccctgctgctggcagcgcctgggcccacggctgatggaggcgtctcctggcccccagggctgtgcccaggactgcaatggcctcccacactacctcactaccctggtccaggctcactgacagatgaggaaactgaggcaggggccctggtctcacggccattggtgcagagctgggatccacgaccaggtgggctctttgttattacttcctccaaggacaagcccaggttctccagggtgtggggtccacgtgtggccacagcgggccttagagacagacaggcctgggtagggggaggggtgggtgggcaaggccttagagacaggcctggcgggggaggggccgggcctgtgcactggcagtggtggcaccacgggcccttggggacaccaagtgagctctttaaagtggctaaagtggtaaaccttgtgttttgtatagattctaccaattaaaaaaaggaaatgtgggccgggcgtggtggctcatgcctgtgatcccagcactttgggaggccgaggcaggtggatcacccaaggtcaggagttcaagagcagcctggccaacagggtgaaatcccatctctcctaaaaaaacaaaacaaaacaaaacaaaacaaaaacagaattagccgggcatggtggtgggcacctgtagtcccagctactggggaggctgaggcagaagaatcacataaacccaggaggcggaggttccaacgaactaggatcgcaccactgcactccagcctggacaacaaagtgagactctgtctcaaaaaaaaaaaaaaaaagaaaaaaaaaaggaaaagagaaagaaaaagaaaaaaaagtgacaattcacatagacccctgaaaacctctgggcttagggacagcaagagccttcctggggcctcctggaccatgtcggggcctccgaggcctctgggacgccatccctgctcagcttcctcgctctccttttgcccgagaacaagctctgttctggccacggcgttgtctacacaacacagctaactgctttgccatcagccctcatacagatttaaaacacacacacacacacacacacacacacacacacacacacacacacaaaagataaggttatgggctgcactgcgtcccccaaattcacagagtgaagtcccgacttcaggatccgcctgtattcagacacagggtctttacagaggcgacaaaggtgaaacaaggttaccagggtgggctctgacctgacctaccggcgtccttaaaagaggaggacacagacacgcaggaggggcggccacgcaaggacacagggaggtggtgccgcctgcctgcaaggagaggcttcgtaacagccacgccgcacctcaacccgggacgcccccaggactggagagaacccacatctgctgtgggagcacctggccacggtgtgtgcgaggcggccccggcaaactcacgtagacaggacccagctcccccaggccatctttcaatgggagagggtgacccagtgttttcccaaaacccagcacggtccccaggacgcgttccccaccagggtgggctgggccggatcacagcccaggctcccagagacttccggtgccacatcagctcacagagcttcctgtttcagcccagatcagaaacaccatgagacgcccaaggaggaatattttaatacttctgctatttggcctcacccaaaaccagaaagtgcagggagtcgtgaaaatgaagaaaatgatcagaacctgagggaccaggccgtgccatccgaagacaatcctgagatctctctccgggccctgccctgcccctccctctctgcccccagcaggagcccccttttcccctggggccaagaacccaggccacacagggtgcagaagacccgccagggaggccacagcaggggacagaaaagaaggcccgtcgctggcatgaggggtggcttccatgtggggaaactgagtcagtagcaattccagattggaggtcctaaccaggtcaggtatgcgggtgccgcaccgtcagccaagaccacagccccacctcctcaacagctgggcccacgccatcgggggggcgttccaagagacttaaaaaaaccataacccaaccccgaggaggtgccctctgaggtggggtgtcccatactagagtcagggtgacctgaggacaggccaggcacacagggccaccctgagtaaagacgggggacccaggagggcctgggactagccaggatggtggctgctgtgttgagagggcatctgggaccccaacccgcagcccctcgtctccttatgagccatggggcctcaggaaatgcaccccatttcgtgcctcagtttccctcctgggctgaactgtgtcccccacagccatgtgttgaggtcctgaccccagacctgtgagtgtgaccttatttggaggcagggtctgcacagaggtaacgaggttaaagcaaggtcagctgggtgggccctgacccacccagacacacagagagagaacaggccacatgacacggggccgaggccgtggcagtgcttccgccagccaagaagcacggaagacctcaggccacaaagccaggagcggcctgggacagaccccactcacggcctcgggggccagccctgctcacaccttgaccttggacttctggcaccataactgtgggagggtgaatctctggtggtttgggggcgtggggtgaatctctgctggtttgggggcgtggggtgaatctctgctggtttgggggcgtggggtgaatctctgctggtttgggggcgtggggtgaatctctgctggtttgggggcgtggggtgaatctctgctggtttgggggcgtggggtgaatctctgctggtttgggggcgtggggtgaatctctgctggtttgggggcgtggggtgaatctctgctggtttgggggtgtggggtgaatctctgctggtgtgggggtgtggggtgaatctctgctggtttggggtgtggtgattttttgccacagcagcgctgggtttccgatacggctacaatgcacatctgcagcaactgctaaatgaggtaaaatacgtacagagccagcacgtggtaggcacgccctcagaagaagtagtgggagcaacagggccctggaaggttccagaaggcctaaaagatgggagaagaatgtgagccgagctctgggatggaccaaagaattccagaaggggttggagcaccaagtctgacctggggggctcctctgagcaaccccaaacctcccagacacccacgagccgccttggctctgggccagcactgaccccgactgctgacgaatcgagggcccgccagccccgtgcactcgctcggagccgcgcaggtttacagcatggtcctgtgtgtgactgcacttggtcctcggaaaattcggaaggtgtgtcccagccgcagcctgaggaccggcaatgtgggcgtcccacaagccacacgccacatggcaggagcaaactgccaatcctcccctctgcccaccaggcagaggcgggagccgggacagccagagcgcctgatagccctggactgccaccaccacaggagcgggagcacccggccagctgcaggcttagagacgatgccctcccggctcctgccggccacaggctccgcattcgccatagaaaggctctgctgcattcagcacccagcccgtgtctctaaatgactggctgctgtttgtttttcttgtggctgcagtggttttctaagaaggtaactcacactgcaaggcagtaaaaatagttaccattcatgccacacctgcaggctggggcctaccggacctggtcccagaggcttacacatgtgcacagatacacatatcacacatgactatgtgcagacgtgtgcacacacacctgcctgcccacaggtgcgctgcacacccgcacacacacatgcacggatacacacatcacacgtgcctatgtgcacacctgcacacgcacggatacacacgtcacacgtgcctatgtgcacacccgcgcacgcatgcagttcaagtccttgcaagccccatgagcaggtgtcctcagcccctttctctggagccgccgcgggcacatgatttgtctgaggtcccatggcaggagagtcagctgctgagctggaatcaggaactaggcctggctggccaacactgcttgtctgggcagtgaaactcattcctcatgaggccctccaggcgactcggtggcctggccgtgggaagaacgccttgccccgccttcccctcgcccccaccgcagcaccagccagggtgctgcgctcctctcgctggggacctgccaagtcatcaccagagatggaatctgccccgtcagacgtccataccacgcccccagggccctgagatcaggtccccaggaggagcggggaagggactggctggagccccggcagtcctgagctccacgagagcagggtctgcccgctcagggaggtctgtccttttgaggccaggcacccagtcctggtcgtccgggtccacccaggatgaccctgccctgttcctgcttctcccaagcacccgtgaccctgggaagcctgtcacaaacacctccctggacaatccacgctacagagtgccctgctccattcccaccacagcctcaggcagcactggcacccacagcagaggccaccctcacaatctcacacttcaggagcccagatgggatgctagccaggttccctagaggtggctttgccggcccaggcagccccatctctccgggaccccactgctccccgggtccagcccggaccctgcagtcggcagtggctccataaagaagtaaaatgagaatatgcacggggcccacacttaggggactcgtgtcacatggtgtccagcatggctcgtgggtgaggacagcaaaaccaccaagaaatgacccgagaggccaacagcagctccccgggaaggcctggcaagaaatccccacaaccacctcacatccattatcaacaaaaacagtgacaagtgtcggcgaggatgtggggaaaccggaagccttgtgtagcgctgctgggttggaagatggcgcagctgcagggagagcaggaaggcagttagttcctcaagtcagaacgagcacatgacgcggcaattccacttccaggcgtgggcccagcagaaccgaaagtgagtctcagagagacacctggcgcccatgttcacgccagcattattcataccagctaaaacacggaagcagcccgagcgtccatcgccagaggaatgaacacacaaaatgtggcccacgcacacgatggaatatttttcagccataagaaggaaactctgacacacgctgcaacacagatgggccccgagaacatgacgctaagtgaaattgagagattttgttagtggcttgaaaccatcattgtatttgctcacaatcccgtgagtcagccgtttggtttgggccggtctcctggcctggtctacccaggctgcccccacccctgaagccacttggtggttagtgccggccaatgaccccatggtgcacacctggtcgacttcccaggttccagttcctcccctctaggacagccgctgggcctcagggtcggggtgactgaggctgacggagatggcagtctcttccacggctgtgcccagggaggctgccaggcacccatctacgcagcagcacagtctaaagccagccagcccctccctcggcccccacccatgcctttctcaccacggctggaggccccaggaaagcaacacagacacgggggtagggagcacttccagacccagcaggagcctggaaggcttccgcagccacacctcttccacagccacaccccttccccagccacatcccattcctgcagggaaacgcttgcagcagctggggtgagtcctggaactgtctcccctgctgggtgcctgtccaggcaccaagtcctgcttgtgttttagagcaggctaaaagcggtatcatgcccaatctacacctaggcatttggtattgaaactgcagaaagttaaagaaacaatcttgaaagaagccagcagcgggtggggaggaacacctaaactacagacaaagaatacattcatttcttatagaattagttttgactttacagaaactgtgcaagtaaaaatacagtggactgaaatatttaaagtgttgagaaaaaatccacaagcctagaattctgtatccagcgaaattatccttcaaaagtcaaggaaaaatagacttagacaaaaattgagaatttgttactagtagacctgctttgcaaaaggtgttaaaagttctttagagaggaaaaaaaatgtacaagtcagaaacttggatttacataaagaaaggcacgagtgatcgagaaggaataagaaaggtaataaaagcttttatttttcttactctttttttttttgagacagggtcttgttctgtcacccaggttggagtgcaatggtgtaatcactgcaatcttgatcacctgggctcaggcgatcttcccacctcagcctcccaagtagctgggaccacaggtgcacactaccatgcccagctcgttttttaatttttggagagatgggctctcactatgttgctcaagctggtcttgaactcctggcctcaaacgatcctcccacctcagtctcccaaagtgttgggattataggtatgagccacaatgcctggccattaatcttaatggaacagacagaagtttgttaaagttataacaatgtacttgattatatatgcttatgtataagtgaaactaataatagcagtgatacaggggacaggagtgaagaattgggaacatactgttattaaaagatacttttggtggggcacagaggttcacgcctataatcccagcattttgggaggccaaggcaggtggattgcttgagccaggagtttgaggccagcctgggcaacgtggcaaaaccccgtctctataaaaaatacaaaaattagctaggtgctgtggcatgcgcctgtggtcccagcaactcaggaggctgaggtgggaggaccgactgagccaagagttccaggatgcagtgagccgtgatcacaccactgcactccagcctgggcgactgagcaagaccctgtctcaaaaaacaacaaaacaaaaaatacttgggctaccgattagcaagcagttcagtgttatttgaaagtgggcttgaaatagttggaaatgtgtatcacaaaatctagggtaaccactgaaaatgtgaaaaagtataattgatgtctaagaaagaatagaaaataaaatcataaaatggtcaattaaaaccacaaaaggcagaaaaaataaaaaacaaaaacaaaaaatagaaaataggaacaaacatggtagatattaatccaactatatcaacagtgactttgaatgtcagtggtataaatgcaccaattaaaagacagagattgtcaaaacggatcaaaaaataagacctaactatatgttatctacacaaaacccactttaaaaataaaaacaatggctgggcgcagtggctcacgcctgtaaccccagcactttggatggcagaggcgggcggatcacttgaggtcaggagttcgtgaccagcctggccaacacggcaaaaccccatctctactaaaaatacaaaaattagccaggcgtggtggcttgtgcctgtagaccagctactcaggtggctgaggcaggagaatcacttgaacccgggaggcggaggttgcagtgagccatgatctcatcactgtagagatgggtggcagagcaagactctgtctctaaataaataaataaataaataaatagacacatgtagattaaaagtaaatgaacagaggaagaaataccatactcacattaatcacaagaaagctggaatagctatattaatttcagagcacacttcagagcaaagaagcttatcaggaataaaaggagttatgcataataaggggtgtggaatatctttccattttacctctttgacttattaaagttttataattttcctcacagatcttgtaaatatcttgttagatttctacctaagttgtgtgtttcagagttgctatgtcttcctggagagtgtggcattcccagggagctgctgttggcctctcgggtcatttcttggtggttttgctgtcctcacccacgagccatgctggacaccatgtgacaggagtccactaagtgtgggccccgtgaatattctcgttttacttctttatggagctgctgctgaatcagggcctgggctggacccagggagcagtggggtcccggagagatggggctgcctgggccggcaaagccacctctagggaccctggctagcgtcccacctgggctcctgaagtgtgagattgtgagggcggcctctgctgtgggtgacagtgctgcctgaggctgtggtggcaattggcgtggtgcactctgtagcatgggttgtccagggaggtgtttgtgacaggcttcccagggtcacgggtgcttggaagaagcaggaacagggcagggtcataccaggtggaccaggacaaccagggctgggtgtccgacctcgcgaggacagacctcccacagcaggcagaccctgctctcctggcgctcagggctatgggtactccagccaggccctcctggggacctgatctcagggccctgggggcatggtttggacatctgataggggcagattacaactctgaagacttggcaggctccggacttactataaagctacagtactcacgacagggtgttggcaaaacagaccagtgaaagcggagagagagcccagaaacaaatccgcatggagagtcaactggtctgtgacaaagcggcaaaagcaatgcaatggggcacagcctccaccaaatggagccaaacaacggggcgttcacattcccaaaatgaatcccaacacacacattccacccctacagcaattcactcagaatgatcacagacctaaatgtgaaatgcaaaactatcaaactcctagaagataacacaggagaaaatctagatgaccgagggtttggtgatgagttttaaaaacacaagactgagcccagtggctcccacctggcatcccagcactttggaaggttgaggcaggaggatcagttgagcccaggagtttgggaccagcctgggcaacacagtgagaccctgtttctttctttctttctttttttaataaggcgggggcggaccactatccaagaagaaaccagtgagaaactcgatttcattaagattaaaaactgctctgtgaaggcactgtcaagagaataagaagaacaagccccaaacctggagaaaataactagaaatgagatatccatgaaaggattacgagccaaaatttacaaacaactcttacaactcaacaaaaagaaaagggacaaccaatttaaaaataggcaaaaattctgagcagatacctcaccaaagaagatacgcagatggtaaataagccatgaaaaggggctcagcatcatatgtcagtaggaaatagcaaattaaaacaatataccactacacacctatcagctggccaaaatccaaaacacgaacaccaccaaatgctggtgaggacgtgaagccacaggaacgcccattcattgctggtgggaacacaaaatggtgcagccacttgggaagacagtttggcagcttcttgcaaaactctcaccatatgatccggcaatcacactccctggtaaatcccctttgggatttacccaaaagaggtgaaaatgtgtgtccacaccaaaacctccacaccggtgtttatagcagctttattcataaatgccccaaactgggacaagcctaagatgctcttgagagagggtaaatggataaactgtggtagagccaaacaatggaatattattcggcactaaaaagaaatgagctgtcaagccatgaaaacacacagaggaaatataaatgctattaccaggcgaaaggagtcaatcagaaaaggccacatagtgcatgagtccaaccacatgacattctggaaaaggcaaaactgtggggacagtaaaaaccatcagtggttacgggggtggagggtgggggaggaacgggcagagccaagggttttcaggtcaatgaaaccattttgcattctctgtaaatggcggacccgtgtcctacatttgtccgaatctacggaatggctaacaccaagagtgggctctaacggatgccgtggactcggggtgatggcgcatccgtgtgggttggctgccttaataaatgtgtgctctggcgggcgggggtgtgcgggggtgatggtgagggaggccgtgcatgcgtgggggcagggagtgtgtgggactctctgtaccttctgctccattttgccatgaagctaagactgcactagaaaataaagtctatttaaaacaaaacagaaaaggtgatgttgagggagccctagaggaagacgctggccagcagtaggtgggaggggcctgggagagggcgggcaccaaggtgggcgtgtcaggtccgtgagccttgggcctcgcagcacgcactggcctgctcatgcccagagcccaccacctcagagcccgggcctggccggggaaggtggagggcacccatgaggcccccatcctctctcctgacactcccagtgcagtggggagacagatgacaaagctgtgatacatgtgtactcacagacctcgagatctgtgcagcgagtggcccagggacccctcctcagccagggcgtgctgggaagtcctctctgcagagtgatgctgagagccgagagacaaggggagccagtaatacaaagaggggggctggtcgtcccaggagggagggatggaaggtgtcaggaccagatgtggggagtaggcatgaacccggtctaggcacaggagaggaagggggtggcttggacatatttggaggcaaaacccatagctggcggcagagggaggggcagggagaaacaggcggctgggaccagtttctcatggggatctgggcacatgatggcccccaagacagagacaggaagaagtacgcgtggggggcccagtctggatatgctgagtgggcggtgccccactccaagtgtagtgcacagagaagggctggagttacaggcctccttgggcaggggtctgagacagcaaggagctcagggggagaaagggaaggagcagccttcaagagagcctggaggtcagagtggaagacgtccatccccaggtaatgagggactgggagggacagtcagaccaggtctggggagaagaacaccaggaaggaagaacaggtgggaatggagaagcagctgggagtggtgggggggttgggggttgagtgtggaggagctgggagtggtgggggagctgggggttgagtgtggaggagctgggagtggtgggggagctgggggttgagtatggagcagctgggagtggtgggggtgctgggggttgagtgtggaggagctgggagtggtgggggagctgggggttgactgtggaggagctgggagtggtgggggagctgggggttgagtgtggagcagctgggagtggtgggggtgctgggggctgagtgtggagcagctgggaatggtgggggagctgggggctgagtgtggagcaggggactgagtgtggagcagctgggagtgctgggggagctgggagtggtggagaaatggagaatgaagaaaggattatcagggaatggggcatgtccacaggtgaagctctggtgacctggacaggaggtgaggaggtaccctggaaggaaataagagggacagggcaaaggggtggggcatgtggagaccagagagggcttcaggagaggatagcccagactctgatggcaccaacaggaagcagcttggtgaggggccgcctgcccgtggtcagccccaaagacagttctgccacgccccctggtggcagcacctaaagccacaaccacgttccagggtgcacagcctgtgggatgcagaggcctctgggatggcaggacgggctggtcccgggaaccatgcatgtcaccagcgcccctccctccccacgccctgaccttgaacccctggttagctcctgttcccactggaccccttgtccccttccttgatcactttatgcatgcctggcactgccatcctccttcccagcatgtccacacccccaccactgccagggggactccatggctcaccgggccacatactggctgcccccacctgaactccaggacgagggcatgctcgtgacagtgcccttggtacctgaaggtgcctggcacgcagcagccacggagtcactgtccagtgaacccaggcccaaactctcctgcagtgaacccaggaccgagctctccggttctgtcacggcccctctctgggcttcccaacgtcccaagatctatttctagggctggggttctggtgctgcgctgcccggagctgagtcccagccaagccctacaagctgcagggccctggggggagcaaagcctcatctgcaagtggggacactgaggacccacagggccacctgggctaagggcagatgcaggtgaggacaggcctggcccagcagaagcacctgcgtgtggggcgccacactggatcacctcagagagagcgcgcaaacaagcacgcagccagtgcctgcgggaggctgagaggctctggggacagtgccaccgttccaggcccgagcgatggttttgcgtatttgctttgtggaaaccccaaagtgaatgcttgtgacttgtgcacttttccatacactcacacacacgtgaataaacatgcgtggtatacgggtaccccccctccagccatgcaaaatgtgtccctaccagcctatgagaaaggggaggagccccaccttaccctggacatgggaggctcctccgctgctggggacagggtaatcctggccccaaggcgagtgctgtgggcgtttgcagcgggcgtgggcgcccgtgaggacttcctgaggcccggcctcagtgggaggaaggccactggagaacccagctcccacggaggaagaaccagaagtgtcaggctgagacccgatgcagggtgcaccggggccttcctgccttacccatgggccccccacgccctctcaaggcggtagaatgaatccgctgattccatgcagtgggtggggagggccgagggggtgtggtgggtaccagtgcaattgagggttcgagtcttgtgggaccagggcctgcacccccattccgggcccagcacctgacacacagggaggtgcaaaccagaccacgcggaacagccacgccagcagccagagtgggcgtttcccacaccgccacccaacactgggcagctcctgccacccacccagcgtggggcctctcaggctggcctggccctggctgctcaggcagagacagacccaaacagcaacagatatgtgacactgagtgaagcgtgcagacacctgactcccaccccaaatgttttcttccccaaacaaccctgaacacacagatgaatgcagcacaaagtctaacgccaacacactttatttcccttcggacgcatctgcaagcttctgccacacctgaacccacggcctggcaccaacgctaccatcactccccagaggtcaatcctgggggctgaggagctgcaatttccctttcttcctgaaaattaagagaactgagactaattgaagaaacctcactgccattcctcactcagcagtctcagcaggtctgaaatgtggctgtgggaagttgccattttgggaaggcgtttattctctgcggctacagggattgcctgctttagaaatccccttacgctgattaactcaaaagtcccttcagagtcaagaaccaacctttcatggtccataaatgtggtatttctggtttcctgatcaggaggcttgcaaacctaaaaatgttcttccttccaaaaactaactaacctgaagtataaaacctcagacggcagaattttctatttctggaaaagctggctgcgatttgtttttgggacacagtgaggcaagtccctgtggcagagaacgaattggcccctcggcctctgtatgtgagagcagcccagccacacccaggaagaaacatcccccatgcactgcagcacatcctccttagagagagaacgcctgcaggtttcggcaaagaaaaaaaaaaaagggcctgccagactcccagctggatggaaagcagccgacagctcctcagccagagggtgaggccaagtcctggcgcctagctgggccccgtccatgcgcgtcactttccagtgagttccagcaccttcctcaccatggctccgatcccatcatggatgtagtggagtgccgtctcgcacatgaaggctggggtcgtgaccaccttgtttttctggtccacgtgagcttcgtgtgcagagttacggaaaaagccacccagcacggacctgagggactttcaggtgtggagccccggcccctcccccaccctcaccgcgtgtcctaactttgttctcagataacttggaagaggagaagtcgctcctggtgcagtctgtgccggcaggaccctgctttctgtatgatttatgctgctgaacaacataagaaggaacctgttcccaattcacatgcattctagaggaagaaagcagcgggaaattccagggaacggggcacctttcatgccagcatcacacaggcccaacacccacacatggccacgagctgccccgccatgggggcgcacacatgcctggggtgctcacaaccaccacgggaggcagtggcagcacctccgcttttcagatgaagaactggccgtgaaggagccggtcctcatggggcagggcaacaggcaacagggcagcaggtggcacaactggggccggccagccacagacctgagcctccccaacaccacgcatgtaaccactggccaggcctccacaccacccaagacacgtgcccctatcttcctgcaagcagtcagaggcctggggccagccttgcactgcgctcctgcccagcaggaaagccgcagggagggagacggggcctgacgtctgaagctgcctgtgagaaaaaagctgccccattgagaggaactgcacccttcagaacaacacctgcaggggaccgggtccatgctctactcattccagtgccttccggcaccccggagtgttctgttctctcagttgggctcacatggacattctcccagatccaggcagggccttccaggagcctccctccaaatctccctgggcaacagccccgctggcgttcttggtccatcatctcagaactcagggtacacacctcaacaggaggggctgggggccgcaaggctggctgaatcacctggccacccaaactggcctgagaacttccgcccaaatgaagccaggaagccccttctcctgcacacccggccgctttcccccagcatctcaggaagcccccgcctcctgcacgcccggctgctctccctccacacctcgcacacactctttcctcaccctccccccgctgggcccggagtgtggctgcctgggtgttgctgagcagactaaacagtcaggcaagggacctggatctgccggatctgccaaccacgcaccagagctgcgcttctgacgtgtctgtgacccacctcacaccagctgggctgtcacagccatctgctctctgcccttagacacatggctgcggtgcccactgggggaggccccacagggagagcagcaggtgcagctcccggtgaagaggccacccaccaagacagcccggagggaggggcgtccctatgcacgtctcagggacaagcacgacagcgggccgggcctggctaccaggaaggatatgaccacttccttcacgcagtgcttggcacccagggccttgatggcctctgcggtcccggcataaggccacttgccaccttcctcctgctcgtggcccacagtcacctcgacgcctctgagcaccttggccgcgaggacaggtgcaatgcagcacaagctgaaaggcgaaaagaacacgggtcaggcaggctgcatggcctgcagaacagaaattaccctcgccatgaccccaggctgccctgccacgggagccctgccgaccctgccccctgtgagcctgcgctgccagaaggctgtggcccatgggatgtgatggaggtggcaccaggtgactcaaggctgagagtgaggtgtcctcagccccactccccgccaagcacgccctgcaggcactcaagcaccaggccaaggacccctgaggggaacccccaacagccatgggctaagccccaagccccaggacaccccagactggcgagagtcccgggctgccaaagtccactcacagagagggtaatgatgtgcggctgccccagccctgagttgtggggtggtctgtgacccagcaatagataacacagctgcacttctcattcacaccagccccccttctacaggaggcacaatgggccaggagcagcctcgccagcctctgacctgcagcacaactctcaacaagtgcaggctggtgggcgcacgcccctgaccctgacgcacaggccgcagcagccctgaaactgagggtcctgccacacccacccctgggacctgcttctgcttcatcaggaacccttccctgccaagtcaacagaggcccctgtgtgccaggcactgtgcccacagcagggccttcagtgacctgtgtcgtccagcgcctcatggccacccaggggcaacagtggaaggagtacggcctcattaacagcagccccatcccctggcaacctgtggtgtagcccacagctgtcaggccccaccctgccctcaacaccccgcacccttcatccctcctcccgctgtctacagtcctacccactcccgacaggcccaggtggaaactgctaccgtgagctgtaacgaaacactgttaaaaacacatttcacagccaggtgcagtggctcatgcctgtaatcccagcactttgggcagctgaggcaggcagaacacctgaggtcgggagttcgagaccagcctgactaacatggcgaaaacttgtctctattaaaattacaaaagttcggcctggtggcagacacctgtaatcccagctacttgggaggctgaggcaggagaattgcttgaccccgggaggcggaggttgcagtgagccaagatcactccagcctgggcaacagagcgatactctcaaaacaaacccgccccccaaaactgcatgtcctgaagcaacttctggctgcctatgagatgaaacccccctgccgccctctgcgcaggcagaaagtccaggaagcaggttctcagcagctcccgacgctgcgtgcagccgcccagccatcaactgccagctacagatgccacagtggctcctggcacagcccagcgcccacctcgactactgcattcaaggaaggggtcccagcagtgagcggctgggccgcctaacagcccctggctggccacgcaggcctctgacaccaggctgaggggtgggtggggccagtgggaaaggatttaggtttcctcaggaaaaaagcctgtgggtcaccgtgcacggaagccccatggctggaccggggagcagacgggcttgtgccctgcagttttcaggggagcctcatggctggaccggggaggagacaggcttgcgccctgtgctgtttccaggggagcctcatggctggattggggaggagatgggcttgcgccccacactgttttcaggggaggcatgctcagaggcagtggttcacctgccaggggctgtcttgtttcatcgagatttttaatcagtcacagaagaaagggccatgggctcctccctctgggcgctcatccaaggaacacttctctgacaaggacgggatcccgaggtggagaccatgggcgaaaccttcaccccggctgtgacacggctgcagcagggacctccttcaggagctctgagcctgcacctcttcctgaggctccactttaggggcctccctggacagtgaccaggcaggtccttaagtgagtgactgtgggtggggagacagaggattccgatagatcctcatccttgttcggctgacagaactcggtagtgagcggccatcgcgagtgcgcctcactgatgttcacccacgcaagtgcggctctcgccctgccagcaccagacgcagctgagacctggacagcacagcgccgcgttccaggaccaccaaggagcaggtgccgggaggctcgtggaagcatcacacctgccgaggcggaacccggccttgctgggtcaccctcacacatctgagagtgacttcccggcagcagacgctgaagagcacacactccctgcggggctgcgacccgccacgtaagccaaggcgcttacgtggatgaaggagtgggcgccctactcgtgccgccaacctcaggacccaggctttgtctgagcagggacaaaggggcgtggttggctgtggctccccaggagggaggccgctgggagtggatggcgtcagggatggagcacgtgctgcagtgactggccagaagtcagcggggttgggggtactgtggctaaggggcttgggagaaggggtctggtaaaggataggggtcctgagggactgcctagggacacctctgggagccaagagaattccaggcctcctctagggaagtgcagtgtgcctctccttcctgttaagtcaccagtgacatcgtgtgaaatcccctcagttaaaacaagaaaaccagctgtgagttttcaggatcagcggcagctcctggctgagaacagaggccgcgggcccacgcaccctcctccctccctccccgaggcctgcacggctgtacacacccgatgggcttcccggcctggtggaactccttcaggacacgctccacttctttattcaccttgcaatctttcccgtccacggcaaacgtgctcctaccgggagacaaaaggcctcctcagacagcctcacaaccagggtctattcctggggggcttcctaggcacagctccagaccctcagtcagctgcagcaagggacatgggcatggctgcacatatgcgcgtttgatgtgaacatattttcctgttttttaaacagaaataagcataggaagcaggaggatcaggaagtggtgcagcaggaggccaccagggcgagagggcccacgccctggaaccttccggagcagctggcagaacccgggctgcggtgctgagactcagacgctggtttccggctcctaactcccgtgctgcttgttagctttctgttacgacgttggctgtgtcgggcctcgggcagcctctgaccttcccgcctgccctttacctgccccaaagcaggactccaatgttccccgcctttctgactgtgggtctcaggaccctctcctgagagggtcccccactccccgggggagaatgctgacgtcatgtttccctgagcactgtgagccacgccagcaaacggggttgtgggaaccccaacttgaagtcaactggtcagttccagaggctcagacagtttaccggtatgtgtcagagggcagttttggggacggagccctcaacccgtgcgatcggacgctaccccgggtccatactgtcggaactgaattagaaggcagcagcgacccctgcgtggtgcatggggaagacccttcacacccaccttctgtgtggacaactgttgtggtgggaggaggagaaacacggtgtgagagtttttccttaaaacaaaggggcagcaggaaactccaggagttcccaaaaaaagaaacgcagtcggcctccaggcataccaagcactcttgcttcgatgaccgtgaaagaaacgccagtttacctgcgacaccagcatccacacctcaggccgaggagcaggagctgtggagggcacgcggggcaggggaggtctctccacactgcccatggggcgtgtgatctggcaatgccaccaaatctacaagtggacacaccttcccacgaacccacccctgggctctacgccaccctcacgcaccccagtcctctgccccagcattttccacatggctttgctggcagagtgctgggaatcttctggaggcagtgggtgttcgccgtccccatgggtgactgtctcagagggtgcagagtggccacggctgcagctcattagagcgcgccgcaccatggacacgcagggcaggctcacccagaacgctctggacaggtcagtgaaaatgggagcttcgcccaggggacgtgggctcagacacacgggcacatcagtcccagggcccatcaacaccttgaaagccaaggccaagacccactgaccctgagaaccaccacacacctcacgcctgtgcctctgggttggcaaaatgtggaggagccatgccagggcacggagcccccagcacaccctccagctgcccctgcgccccgccacacacggtgtcagtggtcagagcctcgtggagacggcagcgacgcagggacaactggacaaaagatcgagcctgacgtggggctgcgtgaggtcaggggtgtgggcggcaccgacgaggcttgctggctttcaggagaccggggacgacaggctggggtggggcttccggtgagagaggggtgagggcacggccaagggcactgagaaaacagctggcatctgaggaaggaggcctctgaggtttcgggataaggaggggcgcattcttcggatggagactgcctacccctcgactctgggtgcaggctgcccagggtggggcaagcggccagccagcctccaacctgcccttgaaacaggagctgccgaccggggccggccgtgctggggctgccacccacaccatggcacagaagccacctgcacgctccgatgcactgcggccagtgctcctgcaggtggcagagctgtccctggagggtcagcctggcaccacctccacctctcaggcagggccatgggggcggtgcccagagaacctccatgaatgtgcaaagagagagaggagacacagagaacagaaagaggatctggaactcaaggacgccaccgtgtgggagccggccaggcctccatgattcacggtccagctaccaaaacagccacgccaaggcggcctcccttcttcctgtcaggaccgccgcccaaactaccaagaaggaaacccatttctgatcctgcaaggttccataagagaattggggccaggcgcggtggctcaggcctggaatcccagcactttgggaggcaggagggttactcgagcccagaagttccagaccaatttgggctacatacatggccaaaaaaaaaaaaaacaaaaccatgggcatggtgacatgcgcctatagtctcggctactcaggaggatgaggctggaggatggcttgagcccaggagatcatggctgcagtgaactaggatcgtgccactgcatccctgcctgggcaacagaccaagacctcatctctacagaaaaaaaaaaaaaaaaagagagagagagagaaaaaaaactggcacttgcaaggagtaaatactcagagactgatttcaacgtgacgagacctacagcacagtgatgagataagagggagccccaaacccactctgacaagctgctgggtaccaggaatgctgagagaagaggcagcagagaagcagaaacaaaagcatggctcgctacaacgctacctaagacccaaccctaagaacagctcccaagtcagagggcaggcacgtgccctgcccagaccctaaacccagagactgctcctatcaccaccccctcccatcgccgctccactgaccacattggacagcagacaggtgcacccccttcccatctgctccacatggaaagcggaagaccttggagctcaaatacgcacaggtttttagccgctccaaagcctcctggaaagatggcagcatcatggttggctgcactgaggttggccaggtctgtgattttgccacgggcgatcctcgcagactcggtcaaaacattcctgggaaagagcacagggcaaaaagcctcagcatgcaggtgaaggactgtggagcgcggcaggggcacagcccacaggcaacacgctccacacacgtggctctcagccacacggggacttacttccaggtcagcatgtttggtcactacctggaaagacaacatggttctagcaacgctaaatctatgctgggctcttccgatcagcacttcagaacctgcgccaaatcactctgaatcttctgcagtcaaggcccatgggaaatggaagtctctccgagtgtctaaagcagacagaattctgtgcactcatcaggacggtgggactcagaggggaaggtaagaagccaggactcaggaccagtgaagcaacccgaaggccagccaccgcaggaagctgctagcccccaggtgtgggggccgaaggtgcaagtccaggtgcagaagccagggtcccaggcaggaaaagaaatcacaggggtccccactggtgagaagcacagccccaggaggcagctatggcttcttcctcgaatctccagctccgacctctcgtggtccgaggccagttggaaggcaccttggaatggcctgcacagggctgtcaggcaggacaggcaagggaaggggatctcaggccacacaggccagaaccacacacaccgcagtaacagacatgctgctgggaaccagcaaaacagatctggagcccagacaggggaagaaggtgggcgaccaagctgagaaccaccacctttgcttaagaccaaggtatgagcagcctgactcagtgggaagcgatccggtcgccattttcagtccttctgtgagtactggaaggaaggcactcctgagccttggcagcattacttccggaacagcccgagcacagctgctcagaaggacgttcatttgcacacaagacttggtttaagctaagccagcaaaaaaaggctgcaccgtgggaggtagacaagaagcaagttccaatcccacccccacacctgctctcgccttcggacggctgccccttggtgtggtcaatcacgtgcatctgagggacgtcaggagcaaagatctggacttcagcccctccacggctcaggtgcaccaggatcctgcacgggggaaaaccagagacaactcttcaaaacgtgccccactcagatttgtgttaacacatttttaaaaacaggattttagctaagtaccaggagcaaattcctaatgtatattaatatcttacttgctctgcaaaaagttacagttggttccataccaagccaaacgtcccccacacccccattccaattcactgtcggttggtgggttacgactatgacaaaccctcagaagtgggctatggagatcagctggtcccaacagctccctttgcaaactggggtatgggggccgggtgactccactgagggcacagcctggaggcgtgcgggtccccggctgctgagtgctctacctacacccagggcctggctgccctcctccagttgcttgctgcaagcaccaagagtgagaagcagcagtgtgctcagagtgccacgtgcacagacggtgtgacggggctttcggtcactacttagttcaatttctagtctccctcaactttcccatcacagatggtgggagagacacaagagaccccaggacaacaccacaggccaggcagctccatctccccaagggcaagggcaacagaagctcctcctggggacaacagctgacattatgggggctcacgctggcatccgcaactcccagtgccaacaggagataggtggctaagcccacccacacactaagccctcactgccccttacgtggaggaggaaaccgaggcatgaagtgcagtgacttgccagagggagaggtcagcacctggccctggcacttgggttccgctacccataagaaatccacccagacaccccagacacaagaccctgccgttctgcctgggagagctcaagctattctggggctattttctatcccaccaaggccaaatcatgaaacacatcctggccctttcccccagctcactctgcctagtgccaactccaaccagccaaggtgggccacccacaaagccaccagcctcaggccactctccatggcctgacacccctttcgccaccacccagctctcccctctccagttcaccctgaaccacatgggaactacaggtacctggcacgcgtggtggcctcctgccctactggttcggcctgcagtcatttccagtagcacaggaaatcaggccaccaagcactcagcaacagctgaccagttacgtaaacagtaacctgtctaggacccagaaataccacgcaactgttaaaatgatgttgagaactgaatgaatgggaattacttcccatgcgtcagaaacatttgcaaaacacgggtgagtgtgatctcagtgttttcaaaatgtgtgtgtcctgaaaaacactcaagtgaaatgctaagtcatttctaggctctaggtgacagtataagcgacacttaaaaactgttctttcttagcgtctccctgggttttgcaagtcgtttttgcttttttttagccaagaatagggtatttaaaatacaagctctctcggccgggtgcagtggctcatgcctgtaatcccagcactttgggaggccaaagcgggaggatcacttgaggtcaggagtttgagaccagcctggccaacatggtgaaactccgtatctaccaaaaatacacaaattagttgggtgtggtggtgcatgcttgtagtcccagctactcggaaggctgaggcaggagaatcgcttgaacccaggaggcggaggccgcagtgagccaagatcgcgccattgcactccagactgggcgctgtctcaaaagacaaaaagtaaaaataaaataaaatacatgctttctctaagctgttcaaaaaagagtaaacttcactggtggagaggccttctcgaggcccccggggtggaggaccagctgcccctgaggacttacgccgaggcctcgtggatctcggtcccatcgtagactccgcatccagacagcacctgcgagaggagcgggagctgacccgggggaaaggggccgacctgggcggcgggagttgactggggggaaaggggccgacctgggccgcgggcgctgacccgggaaaatggggccgacctgggccgcaggagctgacttggggtgaaggagccgacgtggggcggcgggagcggacctaggaagaggggccgaccttgggcagagaacagcgaaggctgatctctggaggcgggagctgacctcaccccctccgtccactcaccagcgcgaccctggccgcggggcgcggcacggagaggtgaagggctgcgcgctgggaaggcgtccgaccgccgggggacagggacgtgaatgcagatgccgcagcgagcctcgaggccaccagggccctcacagccgccattgcggtgaggacagcggggtcggaaggtcacgcagggacagagcgtgcgcacccacccctctacaaacgcgttgctcgtcgggactgcgcctgcgcagccttcggggcggagccaagacccgcccccgtctcagccctatccagtgagtgcgccggtgggcgggggccgcgcctgcgcagagcctccgaatagagttccgggaaccctgtcttccttccggtggtggctgagggctcgtgctcgaggctgagggatgctggtgactcccggggtccccagccccgcccccatcggacgcctccacaggcggcgcaccctttccgccatccgcagagcaaggctgcctcggggcggctcagtccggcgcttcttaccttacctccgtctcatccttaactcaccacgagcgtccagggtccacatcctcctaaatggccactcgtcttaatctcggcgtcaggacccacgcggggtcaggactacccctccgcttccatgactgtctcctcgcggctccggctcccacggagcgacccctccgggttttactgaccccgggatgttgtatcctggaaactgcagttccacccaggggcttgatctgggttagtctgggggcaagtgagccgccgattctgtttgggtttttttttttttttttttgagacggagtttccctcttgttgcccgggctggagtgcaatggcgcgaagtcggctcaacgcaacctccgcctcccaggttcaagcgactcttctgcctcagcctcccaagtagctgggactacaggcatgcgccaccacgccaggctaattttgtatttttagtagagacggggtttctccatgttggtctggctggtcttgaactcccgagctcaggtgatctgcccgcctcggactcccaaagtgctgggattacaggcgtgagccaccattcccgggcactgtttgggtttgtttttttgtttttgttttttacgttcacagcatggacggtcagtgtgaagatcccagctgctcgggtcctagctggaattcttccattaaaaaaatctgtttgttatgcatgggttagttcacagaggaatagctggataagtgctggctttttccccgatttacccattttcaacctaataatgcaggtttttgaaataatgtgaatggttactgctggcggatgttcacagggacacaccggattctacagacacatctgatgatctagccacggctgtcactttccccactgccgcgttgtccatcactaggactttactgccaatccttgcaagatagtggggaactagaataacagacatgggacattaccagttacaaccaaagacaagcttggcacatttgactgtcctcgttcctgctcctccgtgcctggccctcttcaggcttctcagctcctggggagcggccagccagggagcatcagctggtgggagcgatggggttgtgggatggcacaaaaaaacaccaagcgccactcagaaaggaaatgccgaatgcagactctcactcagtcggtgtgggggccaggaccctgtctctaccaagtgtgcgggagctgcccctggccgggagctcccagaccccactgcagagccgcagctccagttgtcccaggggcgactactcaggtgtccatcgccatgcacatgtgacacagaaaagggtgaggcgaggagggggaacgctggaaattgtttcacggaaaagggcgaggcaagggaggggaacactggaacttgtgctttgggtaggcgatagctaaggattctctctcgtctgggtcacggagattgtgcagccacagaacacctggtgtcatcagggcctgagctcctcccttctacaaagacctctggtctgcaggcctgcaggtacagtgctgtgggccacaaggcactgcctgtcgtattcatctccactctctagcacatctggcctcacgccacccccgggaggccggcaggcagatatcagctccacttcccagataagcaagggagccaggtactacccagggtcttgggggccacaccgctggcgagggacaggctgggcctggcagacagcactggcagtcggtgaagtgcccacctcagtgtcagcctcaggtcctgaccctggaggctgctgttactgagctgtggggaccaggatgccctaccatgatggagacccaagcctctctcatgatgactattcccaagggcactgcagaggggaggagctgtctcctcctccgtgtggcccacgcagagctggtgcaggtctgagtgagctcaccaagacaggccaatcccagccccagactccaaagcgtccccaagaggtcagggagaggctctgtgcccctgaccccaaggatatgcacaggtcacagggcagagcccccgctagacagcaggagcaccctgctctgtcagcctgcttccccaggacggaggccctggtggtaaggcaggcaggtcttgagcccccacaagacagcaggatacaacataaccctttttaatctgaagtgtagacttcatcctcacgttagaaaactccatcttttttttaatccctaagttctttatcaaacctttatgttaaaaatataaataagtctcatacaaagttcatgtgaatacctctctgagacgcattttcaacattcatcaccgttcacacggccccgctcctggggccaggtgccagtgcgtgccggcccctggcgtgacccgtcggctcgctgtcctgatgggctacatgtgtgcacaggaaaagcaagtcactaccactagtgacagtatttcagctgttctctggacccctcctctttgctggcccaggtggcacaagggtcccatctccctggcaggtcttagccggcacaatccaacgctgcaaccggctggctctaggccagcatctcttcttctgagtctctgcctcctcctccaagcagatgcaggctgtcatcttcagatgcttctgcctcctcctcacttcccagcgggtctagggagcgttttgtgccccgctgcttggaaactgctagtgcgtactgcatgttatagtggttccagctacagctgtcaatcacacagggatggtcaatgccagcaacgcccaggccctggcctgtcctgcacccaaccacctcctctgtgacccctgagaaaagcagcaggggctggacatgccggttcctccaccccagcagccatttttttcctcttttccctgccccaacaatctggttctgccccatccagccctggggcagcaaaggccttcaaggacccaaggacccaactgtaacatcccatccctttggggtcatcctggcagctcagcccttccgctgggcccaatctagatggcttcaccagcaagttccaccaaacacttaggaagagaccgctgcagagctatgtggtgttgtggagcgagaggggaggaaggcacgctctgaatcagttaattttctgagttaatggaataaaggagaaaagtgatgccaccatcactttacataggaaaggagaactgaaagataaatggatgagaaaggaaggaagcgccccatcgcatctgcagggcacaggaccctctgtgcaggactcttcctgacagccaatggcaaccctacagattggcagtgaacgcctagacaggaggtccaaggaacaatgcgcttacgtgaactctaaaaacatcccataagagggaataaatctaaaggagctgggccgggtatggtggctcatacctataatcccagcactttgtttgagaggcagaggcaggcagatcacctgaggtcaggagtttcagaccagcctggccaacaaggtgaaaccctgtctctactaaaaatacaaaaattagctgggggtggtggcgtgtgcctgtaaccacagctacttgggaggctgaggcaggagaattgcttgaacctgggaggcagaggttgcaatgtgccgagatcacgccactgcactccagcctaagcaacagagcgagacttcatctcaaataataataataataataatgaattaaaaaataaataaatacataaataagggagctagacaaccctcctcccctacagagctctgtgaaaagtccaggacatctcagccgagggaaggcctggcaccaaaactgtggatcagggcacatcccagccttctgtagggcacccagaacacgaggggaggacaggctcgacctggactccaggactctttccaaagactgagtgacacttcaaggacagacaggaggaccacatgaacccacaaggcccaaactcaggctctgcccctgaaccctggacagagcaactcgcaaacaggacagagaacagaccgttcagaaacgcagctgggaaacccggcaactgattggcaacagagggtgatatccctcacatggctactctgaggcctgcctagtcccggctctgcaggacctttagggaaggtgaattggtagggacaaaaaaggcacaaaccacaaagaaatgacaggagaagaggcgggcacccctgcagagtgagcactgcggagggccgggccctgtcctaggcccgcggatgaatcctcgcagcagcagcaacagcacccttttctaggggagccacagctcagggcagccacacctccaggactccaggctgcctggcctcacagtcctgtgaccacccccactgcctgtgcaagtgacctgcaaattcaggaaaggctgcctggtcctacgaatgcagcaatccctccaagagcctggaggattccggccgcacctggagcgcgccacctgcagcctgtctgcctgccacagtgctcactgctttccattcagcgccaggccatttcccaagctggtcaaccacggggtggccgggcaggtgcagttcacccgcaggtgagaagacaagcctccagcactggttccttttgtcctcaaatcagatgacacaaggagcactccacagtgtggaccagcaggggaccgtgcaccccacccacccccaggccctgcacccacacgtacagtttcgacaggtcgtccaggtgccgctggatgctcttctggaggaactgaatgacaggcagcagcgtcccggctctgaaagggagactccctaagcgtgcggggctcaccccgtggtacagtgggctcacttcatgctgcattggcatgtcaaagttcccttttatccagcaggacaagctggtccagtgacctgagccaccgatgaactgcgggggagaccctctacctggacttcagcttctgtccgtgcaacatgagcagtttgtgagtccagaggaggtagaattccaggtggcgagacacttcaaaggaggaagctaaaaactccagcactttctccacatacagttcaggaagggaggaggtgaccacttcaactgcaaaaggagaaaaaatcatgcttattctgccaccaactcaaaccaggggaagagaggatgaccccggcgcccgacaccgaagccccaactcactctcgcccctgggcaccgcctccagggcctcctgcaccagtttgctctcgttgagccggagggccatgaggatggccctggtgaagtcctgctggcgcagtgcctcgcgcaccctcccgggggtgacgctggtgtccagctcaaacgggtcaaagagcacgcgggtgtccagggagtagatgaggagtccctccgtggtggtggccgcccagcagcgccctgggaaattaagcagtgctttcctaaaaatttaagctcattcctcccaacattttttttctttttttttttttttttaaagaaacagtattaagtacattcccctgggacaaagtgcaaaaatcaggaggaaccgggacgtctgcctctagcccccaccccactactcccctgggaaggaatgaatggatcatcccagaagttactctcccagggatgcacatataagcaaatatgtacacgcatgcgtcgtcctctcttgacgccgggagccagccaagtcttctgtctagctcaggcgtcttcagctccgcaggccctgtggtctctgctgcacctactcagtgctgcacggatcactagagacagccagaaggatccgccaacaaaaaaacgcccagtaaaatgtcccagtaaaacatcagtgaccaaagcaggtggccagccagatttggcccttgggcccgagggcacagacccctggctcacatgggcctctctgcccctggctctgacactcagtctaggctggagcacgcttgccaatagccctgctcctggctcctctgtgtggggaccatgtgcaccgccaggctccacaggcctgtggcacagaccctcctccccactgcgagaggatgggggcagtgcgcaggagacgggctctccgtgatggcagagccgcccccaggcagcacgtccagggcactcggggagctgctagagcaagggcataccaggcctgccatgtttcaaagctcagtgcatctgaggttggcaccgtgacagccatccatcctcagggacaacagccatcttgtggcctgcagggtttgcagggccatgttcttacccaggggcacagggcacagcccagagcctgcagacagctccatggtggccagccttgctatggcacagatgccccagtgcccaccggcaccaaaagcccatggctcagtgctcaccagtgggagagaagcggagtgaggtcaccctgatctcaggtttgaagtgccgagaactcatgtcacctggggaaaaaagaaccgttaatgatcactggacagcatatccaggctgctctccccacgaagcaagtcatcctgcggtctcccggctggctggggggtgctgtgggagccccatcaagagcagcagcctctactcattgggtcctgcacaaagcggaggcagaagcagcccttccctcgctgcagctgcggcaggtgggcccgtgctggggccgcggaggctgttccgggtgagctgccaaacagatggcccagcccatggggcagatgctcaaaaaagccagcccggccagcagactgtgtgtccaacccagaaaagggccccagcccagcccaggagtgggtctgctgtgctcaacacggtaccctgggcctgcatatggaagcactcagggtttctggctggcgagtgtcccatcaggatggtctacctgggacccagatcttctagagcacctggctctctgtgcggcgcacatggcctcacgccagaatgctccgtgtgctgtgcagcagacggggcacccagtcccaagagcaaatggacgggtcccgccagggcagggaggccacgtgtagcaacacatgggcagcttctcctgcccaggggctgacggcaccagcaccaacccactgggcctttgacacccccagtgtccagcaaatgtcaccatgtagtaactgttatttccacacactgcagccccaaccaggggcatgaatgcgtggtcacccaggaccggtgagtggtgggcagatgcgggaggaacctctgctcacctttcctgacgcctggcagtggtatcgcgactccatcctcctgcccagcatcctgatcaattagtgccaggttgccaaactctgtcatttttcttcggttcaaaaattcctagaacagcaaaagcagtggacgccttgcttctgatggcctggccgcctggccctcgtctcctacccttgctctttgaccccaacaccagacaagcctcagccctgtctagaacaaggacggggagagagccctgcagtgccccagggactcttcctgcagagctagctgcagacagggtgggtgtggaagctgtggagcagggcaggtgcggaggctgcggagggggatggactgaggtctacatgctggcattgctgccaccatcacaaaggctggggctcacagcgaggatggccgtctactcccttgtgaaaatgccaaggacactttcccccagaaacatttaggggacagtgggcttctgccccgatggggcgtggacaggtgaacccagcagccacacccctgcttagaggctaccagggcttcctcactctcattctgaggtcctgcaggagccagcatgtgagtgggacctgagccgagggctgtgctgagggggaagggcaggcaccagtggggacagtgaaggcagagccttgtacacaggaccctgggcaggaagccatcgggcagggcctaccagcaccctcttcgttcactccttccctgacagatgtccgtgtctcctgagccagcgtgtgctgggcactgcccctcacagctccagcctcctagcaaccagcctcggcagggtcatccacagcagtggttcccaacccctggtactggcccatggtctgttaggaaacaggctgcacggcaggaggtgagtggtgggcaggtgaatgagtgaagcttcatctgaatttacagccgctccccattgctcgcatcaccacctgagctccgcctcctgacagatcagtggcagcattagattctcacaggagtgcgaaccctattgtgaacgacacgtgagggatctaggttgcaccctccttctgagaatctaatgcctggtgatcttgatctgaggtgaaacagtttcatcccaaaatcaatccccccaaccctgtctgtggaaaaattgccttccacgaaaccggtcccaaatgccaaaagggttggggaccgtggctccacacacagctgaggcaggcgctggcttcacggccggactctgctggggcaggtgaggggcccgtgcacttagatacaggacaagcaccacaactgtgcccaaggccccatggagccaggagtgcagaacgcaggagcccgacgcattccacctgcattggaagcaacatccatccggccccgcgctggcggctcacctccatggcgtccagagacaggttgcaagagatctcgaacctcttcatgagaatctgctcacggacgtggtagatgcacacgaacttggacatgcctcccgccaggatgctgtggccgtctgcagagtagcacagggcggtgaaggccctgggtggagaggagacatggacttacggtggccaccacggaaacctcagcgtatggctcctaaaaaccaactttaggcctgcatggtggctcccgcctgttatctcagcactttgggaggctgagttgggaagattgcttgagtccaggagttcaagacaagcttggacaatataccaagaccctgtttctacaaaaaataaaattaacagggtgcggtggcacatgcctgtagtcccagctactcaggaggctgatgtgggaggatcacttgagcccaggggttggaggctgcagtgagccatgattgcactcctgtactctagcctgggtgacaagagcgagaccgtgtcaaaaatcaaaaataaaaataaaaataaaaataaataaaataaaaactaaccttaggaaatagaggagatcctataccagccctccaggaagcaaacaccagcctcagcaactttcgccaaggctcgctgcctcaactcacgcgagacttttaaaacccacaatgtccaatggtgccatcacctggttccgctctgagccagcaccacccttagatgcttccgcttcctgagaatcaatgtctttttcacaaaaggaacaagtggctcaaggaacagtgttccctgctgaggtcagcacaaaacggcgaccagtcggcctccaccctaagcagcctactctcagtcacgtctgcttagtcctgcagaaaccagaaaccagcccttaccaccccgctcaacagacgcctcggggtgggcaaggtcccttagttatgacagtagagaacaaagaacaacagaaaaaatgagcaaagtggacatcatcagaactaagagtgccaccaaaacggtggaaagacagttcacaaagcggaacaaatatctgcacatcaggtatcagagaaacccctaaaatccacaaccaaaatccaaacaacccaattcaaaaacaggcaagagacctgaacagacacttctccaaagaagacttacaaacggccaagccgcagacagaaaatgctgaatgtcactagagaaaccacaatcacaactacaatgagatacgaattcacatccaccccaacagctctcattaaaaaaataataataataaagcaacaagtgctggcgaggaggtggagaagccagaagccgacagcgttcctcgtgggaatggcaaccgtgcagctcctccaagctggaaacagaaccaccagcacccagcagttccacactcagggcgaacccatgaggactgcacacaggcattcataccacttccaagacagggtcgctacttccttctggaggaagaccctctgctgaacaggcttctgagctcctgggacacaggtccagcccccaaggccacccaccccgggcacatcccacagatcctcccccttctcctaagcctgacccccacccaggtgagcctcacagcccagccaggaccccgcgcaggcaatttggtcagtgctgtgctggcccgactccttgagacaaggggacactatgtcttcaccatccacgtagcactctctagtcaagtgaggtgactgaggacctgcatttttactcttaggaggctgccagggctgttttctgcttttgtttgttttgtttttgagacagggtcttgctctagcacccaggctggagtgcaatggcatgacgccatcctcactacagccttgacctcccgggttcaagcgatcctcctgcctcagcttcccgactagctaggaccacagacatgtgccaccacacctggctaatttttctactttttgtagagatggcattttgccacgtagcccaggctggtctcaaacttctgggctcaagcaaaccacctgcctcagcctccccaagtgccaggtctccagtgtgagctcgggcacccggctgctctcccctctgcacaccaggacgatgtcataattcaggatcaaggtttggaagtggatgcaagctctcagctgaacaagtttatgttcagtaaatccagacgtcctcctgtgctgggggctgtgcgatcccaggagttaaggaggacatggactctccccagagggctcaggaccacctgcctccacccacagggactcagcggtctcaggaacaaagaacaaggccaaaaatggagaagctgcaggagcctggtggctggctggggtctcaaatcaggaggcccgatgctgacactcacttccccttggccgcgtgcttggctgtaatcttgtccagctccttcctgccagtcttgaggtcatgcctgccctcaatggagcccgtctgcaccgcgttctcagggtcccagaaggtgatctgtgagttcagtgtggccacagccagctccgcaccatcagggcgaaaagtcacagccagagctaaacagagatgcaaagtaaggcccaacgaagaccccagtctcccgcaggcaggccaccaaccacccttggctggagaccaggccgtgccctggcacccctaagagaccagcgcctgtttggtctggtacacaagaatctcctcccaggagaagctccaacccagacaggtgaggaacaactcagcgccagtgaagagcaccaggcggtccagctggggccacaggacccacaaaggccgatggagggggcgctgggaaggtgaggctgatgggtgagtgatggtggttactgagggcggctggacagactagaatacagagcctctgcaaagaagccacatgtgatgccaaaagcctggccaatgccaggcctgggggtggggtgaggcagcgggaagcagagagaaccagcctcctgggatggcagagtctgtccacacccggacatggatgggctgggtctttgtgagccacgtggtctttcaacaccgccgctgaggcattgacagccacagaccatatgaacacaggaggccacggctgcctctagtacagccccgtcagaaagacaggcagtggcctgaggccagtctgcagatccctgggcagccgcatctggcttccgggcccacctatggccccctcatccttctcccagtctgcagattccgggactggccgcatccagcgtctgggccccccatggtccctgtgtccttctcccagtgacacagccctggcagagctccaaagcaactccgaaaatcaggaagcagctgcggcagcagcccttcaccctcggggagctgttctctcctgcctggcgtacttgcccacagagcgggagccccacaaggacttgtggaagccacgctggcctgactcgccaatctgctgtctcctaggtactgccaacctcaagggctgccacaccagcaggtctggataaaagccaccccctgcttcccaccagaaggttcacaccaaacccacaacgaggaacagggcagtgggtgtgacagcatgctgctggtccccaggccgctgctcctgcctgctgcctcgtgctcaccatcagaggtcagggccagcgtctccttggtcctccagctgtcaaacatgtcccataggcgcaccgtcttgtcccaggaggcactggccaggacggacttcattgggttaaaacacagaccactgatgggcccttcgtgtccagacaaaacctaccgtagagcaaggaggcgtgaagagtggaggtggcggccgaggcggctctctgggcagctctgggccaggggcatgggccctcggagtgtaacctcagctccctgcgctcctctcccaggagacaggagggcccctcctgagccccagcccagcccctcagggtgcttacatcaaggagcctgcctgtctgcatggaccacacgaaaatctcaaaggagtcctgcgcccctgcagagacgatctcaccgctcgcatccaccgccacacaggagaactgggtggggcgtggagaggtgaaggtgcggaagtttcggtacctgcagagaagaggcaaggtcagagtcacgtgccagggtcccctgccccagcagctgcactgcagcctcaccctccaccttcacctctgcgtgggggaagcctgccccaagccaatccggagcaaaaacatcacctgtgaaggtcaaaggctcgcacggtcccgtccatggatgaggtcaccacaacgtagccggtggcagtaaaggtcacaccggtcaccccgctggagtgctccgtaaaagtgacgaagcagaagccgctgagggtgttccacaccttgacctgaggcaggacaggaggggcaggggcagaccccaaccctgtgtgccacggcttcggccaggatccctgtccccatgccgccccatctaagatgcttgcccctgtactgccccatccctgagaccctacccgtgagtaataccccatccctgagacccccaactgtgactgacactccatccgagatccccgcacatgactgaaaccccatccctgagacccccaactgtgactgataccccatccctgagacccccacctgcaactgacaccccatccctgagacccccgcatgtgacgccacatcctgagagccttgcccctgtgcccacggctgccctggctcactcagcctccccaacaggcctgaggctgtgctgagtgggtggtgagtgggccgtctgccccagtctcttcctgtcacctccaggaggagcccatttaaggcctagatggcccgcaggggcactgcacacaccagaaccctgtggatgctggccggatgccagctgccagtaccatggacccaccctcggccacgtactggagccccttggacactggctggatgccggctgccggcaccacagaccctctccccgccacgcagccaccaccgtgcaggagaccaagtcagaaaggggaaagagggacacccaaccctctccattcacatttttgtatgtttttaaacgcctactgagctcatgagcccgggtgaagctgtgaacaccagccctaccgtcaagacacggccccacagaccactgcatcttcacagccccccaggcacagaggccaatgggacggggacaggagcctaccttgccgtcgtccccgccagtcacgatgtactgtccgtcgggcgagtaggccagggccaccatgctgttgaagtggccctgctgcttgagcacgtaggactcactctgccactcccacaccagcagctggcccaggcctgtgcacacgggggaagctggggtacgcggctcaggcccaccccaggtcagactggcccggcccaccttcccacttggcacaggactgagaaagctgccgggcagggggtgaaacgcacaaacccccaagcataggctgggaccactgcccgatgctgcagcttcaccagccagtgatgggccccgcccgtgcaacccagtggttgcaggtcacaactgaggcaggctatgacccccaacccctgagcaaggggcttaagacagagaggtgcttgaggagggccagagcaggaagggcacccctgggaggcagctggaagagaagaaggcaccccctgaaaggtggctggaggaggggagggcaccccatggcagacagctgggggaggggagggccccttctgaaaggcggctgggggagagggcaccccatggaagacaactgggggaggggagggcacccccagtgggtggctgtcaagtaagcctgtagccgggcagcactggtccctaatggggagtccatctctaccacccaggctggggacaaacctgaacagccaaaagcaatccagtcccccgagctattgatggccactgaggcgatgctctgatctgagatgctgcagagaacgggcctgtaagtgggaggccagcctgcccgggctgaagccccagtgcccactcagggcagccccagacaccagattctatccctgtgtgcagagcttaccccacccactcaccagactcaacaattcacttcagttcaagtatcagagggctgggtgcagtggctcacgcctgtcatcccagcacattgggaggcggaggcaaggattgcttgaacccaggagttcaagaccaggctgggaaaacccagcaagacccgtctcgacaaaaaatttaaaaactagccgggtgtagtggcgcacacctgtggccccagctcctcaggaggctgaagtgggaggatcatttgagcccgggaggcggaggttgcagtgaaccgaattacgccaccgcactccagcctgggcgacagagcaggactctgtctcaaagaaaagaatcagagaaggcccagaggggaggccagggttcaacaacttgcaacttcacaattttatgagcatagtattttcgttctctgtgtctcacagatgaagaaaagcggagacaaaaacttgaaaggctgtgactgacccgagaccaatgctgctgactgccagtgggggcggcaacactgtcgcactgaccagcaccagcggccgggcaggtttcgggctgccgtcctgtggcctgagccggcgctccaagtggctctgctgcccccactgctaagggcaggcttggctgggccctcagattcagggccagtgagtgcataaaaccacaccccactgcgagcaaaggcttacctcagggagtggatgaggttaaactctggcagctcatgaagatggaagattccagaagcaaagccagtgaccaagaggtgagacttcttatgaaatgctgcagctgtcaggttgttaaaatccccttctttattgaagaagtacctgaattgacgagagagaagagttgtgaggaggagcgcagagccagactgccaccccagcttgctctgggctccaggacacaggccacagatccaggcaggaggtcccagacctgccctctccctctccaccccaggccctgaagctgcccgcctccatcccaagctcgggaccccaaaggaacctcacacagcatctccactgtcgccagctggccccacagcagagctagtggtgcacccagagacagcagtgcccatgggaggcagaggaggtgcgggaggcgcggcatggccgccaggcacacccgaatcccatcatcccctgctgcttcctcctctaaggaaccctcggtccccatcagcagacgaaggtgaccctgatggcacccccgccctcaaaacctccccaagtcacgttgtagctcagccctggtccttccctctcctttctggaccccgtccctcctgaacaagtgacagggagcactggctgccaatgcagcaggccctcccttcacatgtttcgcgctgacagcccgcagtccccgcctagcaggcacactgtcttcctggagctgcctggaacctcccttccccagggcggggttggggggcccatcatcccttcctcttcctccagtccccgttcaagtcttgactccagcacaacacccccaagtccccgcgggcactgacgggcacggactcactcacgggcactgacccacccgcgggcactgactcacttgtgggcactgacccacttggacctgttctggccaccctccaactccgctgcccttggcaaagcaccctcctcccactggagtccagccggccctccctgctcctcagacccagggctctcatggccacaactcccacctacccagcagaccccaacccctccaaaggcagcccgttctggccgcctggctccctccacaggcagggccttgtgtgggcgccttccccacccagggaccccaactgccgcccacctccgcacgcagccacctcatcactgcacctctcctccccggcggagaggaggcctcacaagggtgggcagtgtgtctcagtgccaagttcagagccctgcacacagcaggcgctaagcaactgcagcaaggaggggcccaggctggggcacccgggtgacggagacaccatagctgcgggcaactctgccttcatgtgatcctgaccagcctcccccacagcccagacgcgggacaccccgaatcagggcagcatctctgccagggctccaggcacagctaaggccatcccacaggcagtccgtggggccgggctcagtctcatctcatctcgtctcgtctgggggactgagtccggatgcggggctgcacggcccagctcagtgcctgaaaaagcaccaagtaccacccaccagcgggccccgaagcaggactcagaccactcgctgcgcccactcacagcccggtccctccctccacccttgccaaacgctctcccggcatctccctgcacgaggccaagggactatcgcccacaccaaactccacagaagctggtggggccacagacaactcccaacccccttagggcccaaggtgctgctattcccgtcacggagtgcccgcacacctccctgccccctatgcacccctacccaccgccctctgccctgccctgggcacacaggcagctcagacagccgaggcagggaccctgcttaaggggcagggtcaacacccaagcactcgagggtgctcaaaccggggccctgagacgcaggcctgctctctgtacctcccactcctcggccctggggaccccacatccagatccctctgggggcaagagattcccacaggagtgccccgccacagcccaccacacctcagagacctacttggccagccgtgagtacttcacttttcctgtcttctcctcctcggccggagtggcttttccccggatggtggtctctctgtcgccctcctggtcctcctcctcctcctcttcctcctcccgctgcaacaggtctgctttccagcccgcagggggcttcagccgcaagccctcggggggcgtgtcacactgccacatgcacagcactccgtcctggctgagtgagtacagctgcaaggggaagcacagggtcaccccagccccagccacactggcccagctgccacaacccggcacctccctccagctcagatccagggaccagtggcaccgacggcccctctgaactctgagaacaattctcgatgggccgccacagctgccatcggtccctagatgcccccaggccacacgggaacagcctgggggaaccgcaggaagaggccgcctgcagcctggggcctccctgaactagccgcttttggccaccatcaggctagggaacttggcaaagggacatacgtccaggctgttggattcaaagaagcaggccacgatggcatccttatgtccccccagtgcatagtagatgaggttgtcccagcgctcggctccgaacacccaggtggacatgtctttgctcccaaccacaaagcacctggaaaagagggagatggcacctcctcagggcttggccataacaaagcagccaggtgcaagctccagagggctgcacggagaccgctacagccccacgtggtctcagagtgagctgagacgcctccaggcacaggaagacaccccggcacagcccctgccctgtctgccttcctcacacctcccagacgctgtccctgccctgtctgccttcctaactcctcccagacgctgcccgagccaaccacagcattcccagtttctgggacaaacaggtgaaagggcagtgcaggggcaggaggctcggccacagcacacacttcagagccgcgaagactcgaccacagccacccagccagtcctgatggtgtgggcagcgcccagccccaaaggaggccgagatgccattgcggaacgaagctgcagggcccaagggggtgacctgtccaaggggcctctctcaagccccgctcccccgaagcctctgaggccgcacctggagtcatccgtccagtcgatgcaggtggtctcatcgtagggcccaaaataggtcttgtccagaacgaaggcgttgaactcccgcttcttcccaggggcatgatacatctgggcaatgttaccctttgtgacaacaaacttcctatggaaggaacgcggacatagttgatattcaagaccagcaatggccctaaggccactgtggagtctcagcctgcacccacctgggccttctggagtcccgcctcctgcaggatggaggccaaggagcagaggaagcaaaagtcagggaagaaacagccctggagggagggcagcctggccgcaccaagccttctcctccagaaaagggggtcaccaatgccagagcttgggccgtgtgcccaacccaacgtcacaacccggggcccagggaaacgagctgggcagtgggcctcaccgtcggcatgcacggccgaaccctcctgcccccaagctgtcccccttacctgccatcaggggagaaggacacactgtgcacagagcccttgaagtggaagtggtgcagcacagacctgcagaccaggctgaccagcagcgcatcgccccctgcaggacgccagaggtcaccaccgcacagctaccccaggggccaccccagatacatagcacgggaaaaacggagaaaggtctttctcgcgtccactgtgaggagtcaggactgagaatgcccaagggccatgaggccctgccctgccacaggtgatgccacagacacagcctgcggcggggacgcagcctcgcccatgacaccctcatccccaatccccacccgggccccaacacggaggcgactggggagcggatcatttcagacccacacagccctgagtcctcctcactggtcccctcagtacccgcccacatcaagggcaagtaccttcatcgacgatgatagcgaggcggccatccggggacagccccacgcacttgacgttgtaccgagtggccaggggcagcgtgtcagatttgttgctgataaagacaaaaaccacagtgtgctgttggtcctcaagtcacatgagggagacaggccaggcctggcctgggaccagcggctcaccctccccaagtagcgcctccaatcttactggaccccacaagccagagctcatctgtggataccccccactcctgaaaaagaaatgacattgttggccgggcacggtggctcacgcctataatcctagtgctttgggaggccaaggcgggcatatcataaggtcaggagtacgagacctgcctggtcaacatggtgaaaccccgtctctactataaaaacaaaaaacaaaaaattggacaggcgcggtggctcacacctgtaatcccggcactttgagaggccaaggcgggcagatcacgaggtcaggagattgagaccatcctcactaacacggtgaaaccccgtctttactaaaaatacaaaaaattagccgggtgtggtggcgggcgcctgtagtcccggctattcaggaggctgaggcaggagaatggcgtaaacccgggaggtgtagcttgcagtgagccaaggttgcaccactgcactccagcctgggcgacagggcaagactctgtctcaaaacaaacaaacaaacaaaaaaacccaaaaaattagccaggcgtggtggtgggcgcctgtaataccagctactcaagaggctgacgcaggagaatcgcttgaacctgggaggcagaggttgcagtgagctgggaccgcaccactgcactccagcctaggtgacagagcaagactctgtctcaaaaaaaaaaagaaaaagaaatgacgttgtccctggaggaactctagtgaaatgcattaaaagccttaaaaatgagctttggatacatcaattctgcttccaggatgatatgatgagaggattattccgcctcagtgtgacatcaaaataccagaagcaagctaagtgcccaacaggaattaaccaccatgacagtgcacccatgtaacactgttgctagaaaaatggaaaataaggggctacaggaatcccgcggagatgctgcagataacgcttacactgcaactgagtgaggcacacacattccagcttccccatacgcagccgagctgtgtttacaccatactgtaaacagtacggcgtagtctactagcgtgtgctgtagtctgtaagcgtgcactgtgctctattcgtgtgagttgtagtctgttcgtgtgtactgtcgtcgaagtgtgtactttattggtgtgcgctgcagtctactcatgtgtgctgtagtctatcagtgtgcacaagcattctgtctaaagcaacaacgtgcatcccttaatttaaaaacactttactgctaaaaaatgctaacaatcatctgagccttcagtgagtcttcatctttttgctggcagacagtctgcctcgatgtggatggctgctgaccaggcacagtggcagctgctgaaaacggggtggccgttgccaattcctaacacaacagtgaagcttgccgtatcgatggactcttcctttcacaagatgtctctgtagcatgtgatactatttgatagcattttacccacaacagaccttctttcaaaaccggagtcaatcctcacaaatgctcccagcgttttatcaactaagttgatgtcatatcctaaatcctttgttgtcatttcaacagtctttacagcatcctcaccagaagtagattccatctcaagaaaccacttgctggccgggcatggtggctcacacctgtaatcccagcactttgggaggctgaggcgggtggatcacctgaggtcaggagttctagaccagcctggccaacaatgatgaaactccttctctactaaaaatacaaaaattagctgggcgtggtggtaggcgcctgtaatcccagctacttggtagggtggcccgaggcaggagaattgcttgaacccaggaggtggaggttgcagtgagccaagatcatgccatagcactccagcctgggggacaagagtgagacattgtctcaaaaaaaagaaaagaaaccacttgctttgctcatccacaagcagcagctcctcattcattcaagattgatggcaacattgcggcaattcagtcccatttcaggctctgctttcatttcgaatcctcttgctatctttactgcatctgcagtaacttcttccaccaaagtctcgaacccttcaaagtcatccatgaggcttgatactaaacttctgtcagactcctgttaatgtcgacactttgccctcattgaatgaatcatgaaatgacaactagaatggcgactccttcccagaaagctttttattggcttttcccagatccattacaggaatcactatctttggcagctagagccttataaaatatatttcttaaatggtaagacttgaaagttaaagttactcccgtaggctgaagaagagatgtggtgttagcaggcatgaagacagcatctccttatgcgtctcctttggagctcatgggtgaccaggtacgttgtccaacagcagaaatattttgaaaggaaccttagtgggttcaacaatgggctggaaagattcaggaaaccatgctgtaaacagatgtgctgtcgtccagactttgctgttccacttatagagcacaggcagagtagcttgggcatcattgtgaagggcattaggattttcagaacagtgaattagcactggcttcaacttaatggccccagctgcattagcccctaataagagagtcagcctgttgcttgaagccagacactgacttttctctagctatgtaagtcctcgatggcatctttttctttttttttaatttatttatttttagatagagtcttgctctgttgcccaggctggagtgtactggcacgatctcagctcactgcaacctctgcttcccaggttccagcaattcttccacctcagcctcctgagtagctggcattacaggaatgtgccaccatgcctggctaatttttgtacttttagtagagacggggtttcaccatattggccaggctggtctcaagctcctggcctcaaatgatctgcctaccttggcttcccaaagtgttgggattacaggcatgagccactgcgcctggccatctttttccaatagaaggctgttttgtctccattgaaattttgtgtttagtgtagtcagcttcatcaatgatctcagctagatcttctggataacttcctgcagcttctccatagcacttgctgcttcgctttgcacttttatgttgtagagatggcttctttccttaaacttcatgaaccaacctctgctagcttccaacttctttcctgcagcttcctcacctcagccctcacagaacagaggacaggtagggccttgctgtgcattaggctttgacttgcttaaaggaatgttgtggctggtttgatcttctatctggatcactcaaacttttatccgtatctgcaataaggctattttggctttcttgtaatttgtgtgttcactggagtagcatttttaatttccttcaaaagctttttctttgcattcacaacttgcctgtttggtggcagagacctggcttttggcctatttcagcttttgacatgccttcctcactaagctgagtcccttctagcttctgatttcaggtgagagttgtgtgactcttcctttcacatgaacacgtagtggccactgtaggccattattaactggcctaatttcagcattgtttgtgtcagggaatagggagacccaagtagaggaagagagacgtgggggggtggggaacagccggtcggtggagcaggcacagcacacacagtgcttaccgattaagctcgctgtcttacatgggcacggatcacggcaccccagaacaatcacgatagcaacagcaaagatgatcacaaatcaccctcacaggtataataaactttgaaatatcacaaaattaccaaaatgtgacacagagacatgaagtgagcccccactgctggaaaaatggcaccgaccaactttctccaagcagtgtttccacacaccttcgcttcgtggtaaaacagcatccgcacagagccagagtgcaacaaagtgaagcaaagtgcaacagcacacaggaagaaaccgctaaaccccagcgaataaaactgacctccggctgcagagctggaagctttgggcctgcccgtccgactggtgaggcccagtggcagcagggctcccgagcaggggtccaaggtaccttcaactcccccagcagccctggcctttcagcccttaggggccttccctgatgggggaagggctaaccctgagctacaccttttcccccacccacccttcacagcacagggacagggtcccttcccacagaacggagccaagtgacacaccactttatggggcctggctaaggcactacaacgaagaactgggtctggctgccaatttccacaactgatctgctgaccctagtctgtcctgtagtcctctcctgggctcccttaattaacgggtgcaccattaaaaggaaggcacagaagacactatcagttttcatatgttacttaaaaaatggtgataatagtaatcagtatcactattatgaataccactttcacatacttactttttaaggtcaaatacagtgactctattgcccacgggactgataactgaatttccattgcaggtaaaatttaggttcccacgccggtacaccgtacccagcaaatttgaaaactgtgaagaaaacaaaattgtcttaacacaaagaaaacagtcgactcccagaaaagcactaagtgaggcatctgggcagagagatggcatagagaaccccaccttgggggcccgttcacctttcctgggtaagagaggaagaagtgagcctgatcctcaggagaccagaggagcccgggcggccccaagctcccacagagatgggtaagatgcccctgtgagcactgaggaagcctcccaagacaggaggcgtctgccaggtgaagaggggcatggagcccacacttcaccaagaaaaaagctgcaacaatggaacagcaccccaaaagtgcttagaactcagggcttccagaagtgtggtaagccagcatcctatttactaactcacgagcacgagcgttcactggagactgccatgcgcacagacacgcacaccttatattctctctctagcaggagggggatgagaagtgtgggagcaggggctactttagacggtggtcacggagaggcacctggaagggtcacctgagctggaatctaaatgggaaggcaccagccaggccctgaagctgtgagtgggcagcgccctcaggacctcagggaggagcttggtcagcagaaggactttaagcggccaggcaggctccaaggcacattttttgccaccttgcagtaggaatgtggagcggatgaagtcctggcctgtgaggacgtggatatggtttctggtttggtgctgggcacacagcggtggctccaccagcacaggggacacaggagcagcactctgaggggccagtaccatgcccagtttcggacaggacaagtgtagtacacggtgggctcagcagcaggcggcccgtgcaaccctggaagcgcaacggtcagggccactgtgggaaacacaggcgtccccataaccggccagctgtagcaaacgcttcagagacccccaggccggctccgcggccccctcttattacctgtctcacccgcctcctgcacttcacatctgggacaagtcttccctggctctcaaagctgagggcgtccgcctcaggaattccctccggcctcgggaaacagagctcacacctgggttccccgcccttccgctcacctggacgctcgctcgttagggaccagtcccgggccccgggtccctgctgttctcaccccgcctgcgcgcgcccgcgtccccgccccgtcccacctcctcatccctcccgagggtgctgtgccctccccgactgcaccaactccagcctttaggttgggccatactcaggttaaaaatatcccgggaccccgacaaatgtccctgttccctccgagaagccgtcggcgcctccgtcccagctctcccaggagccccaccacagccccgcgtccccgaggccatgggcgcgcagacagccggcgacccccacgcggccagacgccgcaaaagcagaccacgcgcccccagcccgcccggagccagctcaggcgccgtccaccggaagagccgcgccgatccaacagaccgcccgccgcccgcgctcacccggtaagcgaacttcatcacggctgtcgcacgtgtgccgcagctcaacccggcggccgcccacagagacacttcccgggggtccgcgcggcaccgcccacagcacgcacttccgggaagcgacggcgtgcaccgcccacagcgcgcgcgcccgggacggggtcgcgcaccaccgtccgcagcggcccaggaggcaggagctgcgtcgccctcgccccgccccgaggcggagtttgaacgcgaggcccaacccctcccaaggcggggccttctccgggccccgcccacaccccggagccacactgcagggcgcctcttaggcgcgctccagcgctgggcgcgctccgcacggacgcccagcctggcacagcagcgtccacaacatgagagcgctgcacacccaaatgtcttcgttcttgtgaactgttgggtaaggaattatgaataaagtcccgaatgctggccggtgcggtggctcacgcctgggagactgaggcgggtggatgacctgaggtcagcagttcgagactagcctggccaacatggtgaaacatcatctctactaaagtataaaaatgaggcgcatgcctgtagtcccagctactcgggaggctgaggcaggagaatggcttgaacctgggaggcggaggctgcagtgagcccagatcgcgccattgcactccagcctaggcaacagagcatgactgtctcagagaaaaaaaaaaaaaaaaaaaaaaaaaatccgaatgtttcccaaaaggcaaataatctatgcccaagagtcaggaacaaggactagggagataaaacaataaaatcttcacattacatactgttgtcacaccatgtcgcagcaaaagatccagtgcaaaatagtttcttcttaaaatgtgtattttcagaattacaatgcttacattttaaagtcttaatacaatggttttaatctaacaatatattacataatatgaaaaatgacttttcatagtaaaccatgaaaatggaatacctgcagtgtcaaagtcaccaacttgtcaccttttccagtcacagaatcccaacacattgtattaatgatgactggggggggtcttacagcctgatgtatataggatgaataaatgtagagaaaggagcattttcatgaaaaataaaatttaaaaaccaggtaggatttattttaaagaacacagttgaaagtaaaacatttacatcagcccagtttgcccttttataaaaagtagtatagcttttcattttatatacaaacctgcagtgtctgatttcattttaaaacttaattttaagcactaaagaaaatttgaatagaagcctgtgtgtattttctctgctaattctgtatgggatatctggcatctccactaagagtaattaatacaggaatctgaccctcctaggctgtgctgacaatggaactgttgtaggtaaagtcattttcagattaaatacaacaatttccacattagaatcagaagagttataatttttccaatcataggacatcccatgaaattcacaaaaattataacttattttattttccatttgacagtatttacatgttccacagatatttgtaaaacggctgcaaattccttgctttttagatacacattgcatatctggcttcacaattatttaacatctctttatcaacaaaaccagcttgtctcaaacacatacaccttactttagataaaaacaataaacatccaattacagttactcttttaggacttttatgatgaacattaagaaaaaaatgacaattttgggtgacattcttctttgtcttaaagaggcagaagcattcatgtaacatagtttgcaaaagatcttttgggtaattagggggaaaaaaactgataaatttgatttcatttcatttccaggcaattaagcgccgtaaacattttaaatttccccttcactttcttcctctaaatatatatgtagttggataatttcatcctgggagtagaaccagatacaagaaaatcaaacagtaataaatgaaacattccctcttccagaaggtaagagagaaagctacattacactggggaaggctcccaggctgacgacacggattacagtctcttctgacggaatcaaatctcccatctctttattcacaggacttggtagaaatgcagggcaatcgtcaatttttacaataaaaaaccttattttagaaaccctaaactatcattagattctgaagttctaatttgctaactagtttgaccaagtttgttaaactgcacatgaggaagataaatttctggaaagtttaattacacaattatttatcttctttacacgtctccagtttctacaaatgaaaaagacaggaggaaaaaaaaatcacaccacctttatttattgaatgagctaaaagacaacacagagaatactggaaatgacggctgtcatatttccccggtctgtgcctccttcctcccatgccccaccgcctcccgcaagcacagtgctgggcaggaacccggtgctccttctctccacaacttgcacatccacggggattcacacgagggccacccactgctggacccgactctatctgcttgagctaatcttgtcaagttcaattccaagcacatttgcccagtaaattaagagtactctatttcaagtgtacaaaaatacatcgctttggagaactggaaaaggtttaatacatacaacacttatttacaagctgtgactttcacacctgtaaaaacaaacacacttatttttgtccttgatttttggtgcaacttatacataaacattacatcagttagtctgtatttttaaaaataataaatcaaccatatgtacaattaaatttacaaccgaaagcaaataatccattggaacagtgtgactgcaactcagtagaccagtggaggacattccaggacttgagtccttccctacaaccagaccaaaaacacactgaggacctctctcatcctcacgatggaatatcttaatttctaagacttaagatgcaaaagaaaaataacgattatacagctacaattacatgtaaagactttaaagggacagaaaaacaacatattaacccccacatatataatgatcattaaattaaatatatttaactcccagtgcatatgatattctatcaacattatgggggaccacagggttccagaaacatttatccctaaaccacctcaccgctgaggcgctcctcacagccgggtctcagctttcttcagtacctttcacgtggctccggctgatgggcctccaggtcccccagctccggcatcccaaggcacagaaggggttatgatccctccctcccccacccgcctcccctagaagggtgttattctagaaaagcacaatgagaggatctgcggtaaacggctgttttaccccttaggggacacaaatccaccccgatcaggaaactgggcagctgtgtgaccagaaaggcacacacgtcactaagaccgtgagggctgctgagtgtctacctgaaagacaaatggccttccacgaagagccagcagacggaggctgttccgtggagacagcgtgggtggaaactttcatgagcagcgtgtgaggtagggggagggaggccagggctctgagtaagcggcgtcggacaccagcatggggacggggtgagaaaagcaggaatctgagatcacaggcggcatgaaaacaacaacagaactcagctggccagctgcgtgatgacactctctgatgtccccacggccaggcaggaccactgaaggtctggctggagccagaacggaagagtccagtcacagtcccataaagtgcactcctagctgggaagtggcgtgtgttcaccctggcgttgtcatgttacactgacttccaggacgtggtcatcttggctggggatgaccaggacttgtgtgcccgagctggagttgaagacctggccggccggcagtgcctgcagccggggcatgggtaggcctttgtgctcgctgctgcaggccgaatgcacgctgcccctgctcttgaggctgctgctgtccggctggtcgtccccgtgcttgtctactgacaggctgtcgttttctatccagctgtctgcaaaacacacaggaagttagacccaagctgcgccgacactcacctggggacgggcaaagccacacggagccaggctgaacgtgcagaatgccacccgaggctgcccctttacagagcactctgtgcacagaggcttggctttcagagcaggtgcctaagattctaacagcggatgaggcttctagtaccagtttctaccggcactgaaaacacgccgctagttctccaacctgctcagtcataagtttatcacctctcgcacaaagtgctcacctgctcaaatactgaaggtaaactttttcttccaaagtccttaccagcgtccagttgggaggagtgtgcagaatgatgggggaggtacttgaacagcctgacgtcgggcagggggagatacccggcgaagagcggcatcacttccatgtggaccctgtgagtggcccgagcagccactggcatggagatgacaccgcagcttttcccacacactgcccagttgctactgttgtcgacaactgaaacgagaggaagcgatgtgtcatccaggacgggccttccagtactcaggcgagagtcacggccgtcgttacccaatcctctcacccaacgctgtctgacaaaacactgcggacacagagcccagtgccttgtagctgcgcctgaagataaagccatgcactttcacggtggcaacccctatttcattgagtccaatttcaattagttctggattagaatgaattatgctggacgtgtacagaaaactgcatttttcctgtgaggttaataaatgatttaattttgttttcaaatttttgtgtcatcttccacagtatggtgactttggcagttaatgggttctgtctggtaagtggcagtatccaagaccactgggtctgaagccaactctgccactcagaagagcaccccaaggcctccaggctcaatgaccgctgtatagtgctgagaccaccaccagcctcacagagctgctttttaaggatggaaagagaatacgtatgagggaactacaaaaagttcatgcaaaaatggaatccaaagatgaaaacagaaaatataagctttatttctcaacataagccccaccaaggtcaagacatgtttgtaagcaatgatgccattgcttacgatgccatttagtccatccctgaagaactgggaggcctgagaatttagccatgtcaacgcagtctttctctacattattagctgaataaaaatgggtgccttttaaagacttcttaagatcaggaaaccaaaatcagtcagaaggagccgaatcaggtccacaaggtggatgcctcatgatttcccatagaaaccctcacgaagttgggcttgttagaggaatgagcaggagctttgtcgtggtggaggaggactctctggtgaagcttccccaggggtttttctaccaaagctcttgctatcttcctcaaaacaatctcataatacacagacgctgctgtcctttgactctccagaaagtcaacaagcaaaatgccttgagtatcccaaaaacctgttgctgtggcctctgctcttgaccagtctgcttctgctttggtggggccaccccacctcttggtagccattgccgtgtctgctttgtcttcaggatggtactgggaaggccacactgcatctcctgttatggttctttgagtaaatgcttcaggatcttgatcccgtgtgtttgaagtttccatgggaagctctgctctggtcggccacggacctgggtactagggttttggcacccactgagtggaacgcttgctcacccttcaggcgtaattgcataagctgaaccagttcagatgtctgcggtgttggctgtcatttctgctgttgtcagttccctccaattagggcatgaacaaggtgaattttttccttgaaaatggatgtggatggtctgcttgctgtggccttaatcttcagcatcatctcgtcccttcttaaaacaagatatccatttgcaaactactaattctttggggcactgtccaaagaatttcataaacttttcataaagcatcaatgatttcaccattcttccacccaagcttcaccataaatttgatgttggttgttttgttgttgttgttgttgttgaggcggagtttcgctcgttgcccaggctggagtgcagtggcgcaattttggctcactgcaacctccgcctcctgggttcaggcaattctcctgcctcagcctcccaagtagctgggcttataggcgcctgccaccacgcccagctaatttttgtattcttagtagagacggggtttcgccatattagccaggctgatcttgaactcctgacctcaggtgatccgcctgcctcagccccccaaagtgctgggattacaggcgtgagccactgcacccggccaatgttggttcttgatttaattttagcagaattcatgttgctctgataggggctcttttaaaactgatgtcttatccttcttagtgcctcaaactagatcctgctcagtgagtaggagcttattttggtgcaaaaagtgttgaaatccatgcatagttttttcataacgtatcttccatgatttttttgaagaccccttgtatgtaaagcacttagtaccactcctgggacatggtagtgtcttaatatatggcaggtgttattattaacattaattattaaaacacaaccatcatgtaattcaatgcaattcaaacacttaagtgatcattcactgggactagccctggagatatgaaagtaagcaagacaggatccttgccatccagtagcagtagacctggtaaagaggtcacagcttcccatcatgaggataccgagcaaccgcccagggggagtgagtgaccagaaggccacgagcagcagagaagggctcagggaggtggacatcctgtagttggggatgggggacctttgaggacaggagctactacaggacatgcagaggccctaggagtgtcaggaggaaggcaaaggagtgacagttctcagagtgtggctctcagggcacccgcaagctcatagctttcacactgctgcctttctacgctgctgacctcgcgctgctggggcaaccacaatggcatgaactcgggccagactgcgcagtcatgtcactcatgttctttactaccatgaactcacagcaaaaaaacaaaaaaaaaaatgccacgcttcacaaagcagtcaaaagtgctcattttattaaattcagctcctgagtagacttttttttaattgtgaaatgtttatagactcacaagaagttgtaaaagtagtagaggggtcacataccttcatcaccagcttcacccaactgtgccatctcgtgtaacacaggaagctgacactggtaccatacagtgacccaggctgcagaccccactggatttcactacagagtgaaccaggctgcagaccccactggatttcaatacagatagaaccaggctgcagaccccactggatttcactacagagtggaccaggctgcagaccccactggatttcaatacagctagaaccaggctgcagaccccactggatttcactacagagtggaccaggctgcagaccccactggatttcaatacagatagaaccaggctgcagaccacactggatttcactacagagtggaccaggctgcagaccccactggatttcaatacagatagaaccaggctgcagaccccactggatttcactacagagtgaaccaggctgcagaccccactggatttcagcagctttcgcaggcattctttgggtctaattctatggcatttgtcacatgtgtagattcgtgtaacaaccacagcggccctggcccagaactctccattaccacagaggacggcctcctgctgcctcccactgctccgtggaacactgacccgctctccttctgaggctggcattttgaggatgtcatttagaaatggaatcacacagtacacctccttataggactggcgtttttctcttagtataatgcccttgagatccaaccacagcactgcgtgtgtcaacagtcccttctgtttcactgctgaggaggaatcagatgtgccagtttaaccgctctcgagctgaaggacgtttgagttatttccattcttgagtgcttgtgttcttgacattctctgggtctctgctgcagaatgacagctggctcagggaaagcacacggggagcgctcggtgctgcgagctgaaatagccgctgttttcacagaacgcccttttcacttgcaagagcgctggggaagctagttattcagtgttgggtatttggtagacgtctgattaaaaatgaatgatgtaagcctgtcacttcaaagaaaacaacacgactatttgctgccaatgatgccatctgagactttaagcaaaaatcagaattttggaaaacttacacttgccactgtgagcttgaaagagttctgatgctccaagccctccctgagagatcacaaatgcagattttaaaaaaatattgtcaaacgaaaggtgcccacatttggaagatctgcacaactcaggaaaccatgtttcccacatgactaatggcacagggtgtaacgctatgatgcctgggtaaaagagccattcaaaatgcaagataggctgagtgcagtgcctcacacctgtaatcccaacactctgggaggccaaggcgggaggactgcttgagcccatgggttcgagaccacctaccttcatacataagctttgtcgaaaaatgctcatcagattcagtcagtgcttcatctttatccacctccaagaggtctgagagcctcgtgatcaaaacctccagggagcagagggagcctgttctgcaatactccattcccgaagggggaaagatctcagccttcacgttgtataatgtctgggcaggaaagggagagaatagaaaggaaatgtacctaagtggcctcaagaaatgcaactagaggaaaaagcagagctgcccacagaccctggagagctgaggatagacacctatctgctcggctggccttagagcaactgtcgccactcactctcaataattcccactggagatgcaatgttttcggaagtcctacactccgaaccttaacatccttctttaaattatgaacattttcaaccacaggaagaaaggatagcacagagcccttccagccgcctatcacccagatcctgagatctcagcatcttgctgcctcagcatcctcttatcaagccatggacatttctgtatttgcctgaggtaatttaaagcgaatttcaggccaggcatggtggctcacgcctgtaatcccagcactttgggaggccgaggtgggcagatcacttgaggtcaggagttcgagaccagcctgggcaacatggtgaaaccccgtctctactaaaaatacaaaaattagccgggtacagtggcaggtgcctgtaatcccagctacttggattacttagcaggagattcccttgaacccaagaggcaaaggttgcagtgagctgagatcgcaccactgcactgtagcctgggtgacagagcaagactcttgtctaaaaaaataaaataaaataaaaaaataaagcaaatttcagacaacctgttattttgccccatctgcttcagtatgcattactaaacactaaggcctttttcttaccaaaacacaatgctattattacaactagcaaaagcaacaggaattccttggtataacccaattcagtccataatctactttgtccgtgttttctttccataatcaacctattctcggtggctattcaaacatgcttaacattctaccaccacccatgacaaacgatcaaaacacatctgccactgccaagatgaaaaagggctcatgcactacaacctggcagttccacttctgaggggaagcgttgtgtgtgcgcgcgagcgtgtgtaatacagtatagcttgacttaaaaagtgttctattggcattgtaaaatgttcaaagaagagatttcagtatattaagaagcatttgtctggagtctgaggccaagatgaagccgttttatgggagttcacagcctaaacagcagtcccaagagcggcctttctaggtgatctcctaccaaatgcccaattacctctgttcggacatgggacaaactcccaccagtctcaagaggggccatgctgggacttcctggggctctcaagccacagggcagaaaagatcccaaatacacagatgcaaaagtgccagccgtgggcccgggtgcccgtaggtcctgggaactgaagcagtagaacactgtgctagaggcccactgaaatacctcctcctcagaagcttctggctggggcacagtctgaatgtttctgaatccagcaaagaatgcagatttgcctcagggcttgaaggacacccagagttgcagtaggacacagtggggtgtgatgagacctgcgtgtgcctgaacgctgctctgggctgcatctgggaaggagagtggctgggggaaagcacagcccaaggcgagcagcaggggcctcacctggcggcacctggagctcaggcacagggaccagaaccgcagagcctcttcagagagacacgcgagcactgacggccagctggaatctggcaagggggccagggccaccctgcagggaggaaagcatcgtcatgacagatgggatagggacacctgctgggtcatttgaaaagaacaaatttggaccctacctctcaccatacacagaaattaagtcaaagtagatcacagacctaaatgcaagtgctcaaattacgaacatcttggaaggaaatgcaagagaaaatctttttgaccaaaggcaatgattttctaggtccaaagcaaaaaatttaagcaataaaagagagagttgaattggatttcatcaaaatttaactttggtgcttcaaaagacaacaaatggaagaaaatacttgcaaatcatatataaggacctggtacctaggatatataaagaacttacaattcaataataaaaaacaaataaccctatttaaacatggggaaaggatctgaacagacatccttccaaagaaggcagaaaaatgggccacacgcccacgagccgcagcacatcaccagccactggggaaacgcctgccaattgggacagccacaaccaaaaacacagtgagacaagtgctggcaggacacacagaagctgggactctctgggtcccagctggaatccactatgttgctggtgggaatgtagagccctctggaaaaagttggcagttgctcaaaaagctaaccacagagttaccctatgacccagaaattccactcaggtctttaccaggagaattgaatagatacagcaacatacaaacccgtactttgggccaggcacggcggctcatgcttgttatcccagcactctgggaggccaagcggggtggatcnnnnnnnnnnnnnnnnnnnnnnnnnnnnnnnnnnnnnnnnnnnnnnnnnnnnnnnnnnnnnnnnnnnnnnnnnnnnnnnnnnnnnnnnnnnnnnnnnnnnnnnnnnnnnnnnnnnnnnnnnnnnnnnnnnnnnnnnnnnnnnnnnnnnnnnnnnnnnnnnnnnnnnnnnnnnnnnnnnnnnnnnnnnnnnnnnnnnnnnnnnnnnnnnnnnnnnnnnnnnnnnnnnnnnnnnnnnnnnnnnnnnnnnnnnnnnnnnnnnnnnnnnnnnnnnnnnnnnnnnnnnnnnnnnnnnnnnnnnnnnnnnnnnnnnnnnnnnnnnnnnnnnnnnnnnnnnnnnnnnnnnnnnnnnnnnnnnnnnnnnnnnnnnnnnnnnnnnnnnnnnnnnnnnnnnnnnnnnnnnnnnnnnnnnnnnnnnnnnnnnnnnnnnnnnnnnnnnnnnnnnnnnnnnnnnnnnnnnnnnnnnnnnnnnnnnnnnnnnnnnnnnnnnnnnnnnnnnnnnnnnnnnnnnnnnnnnnnnnnnnnnnnnnnnnnnnnnnnnnnnnnnnnnnnnnnnnnnnnnnnnnnnnnnnnnnnnnnnnnnnnnnnnnnnnnnnnnnnnnnnnnnnnnnnnnnnnnnnnnnnnnnnnnnnnnnnnnnnnnnnnnnnnnnnnnnnnnnnnnnnnnnnnnnnnnnnnnnnnnnnnnnnnnnnnnnnnnnnnnnnnnnnnnnnnnnnnnnnnnnnnnnnnnnnnnnnnnnnnnnnnnnnnnnnnnnnnnnnnnnnnnnnnnnnnnnnnnnnnnnnnnnnnnnnnnnnnnnnnnnnnnnnnnnnnnnnnnnnnnnnnnnnnnnnnnnnnnnnnnnnnnnnnnnnnnnnnnnnnnnnnnnnnnnnnnnnnnnnnnnnnnnnnnnnnnnnnnnnnnnnnnnnnnnnnnnnnnnnnnnnnnnnnnnnnnnnnnnnnnnnnnnnnnnnnnnnnnnnnnnnnnnnnnnnnnnnnnnnnnnnnnnnnnnnnnnnnnnnnnnnnnnnnnnnnnnnnnnnnnnnnnnnnnnnnnnnnnnnnnnnnnnnnnnnnnnnnnnnnnnnnnnnnnnnnnnnnnnnnnnnnnnnnnnnnnnnnnnnnnnnnnnnnnnnnnnnnnnnnnnnnnnnnnnnnnnnnnnnnnnnnnnnnnnnnnnnnnnnnnnnnnnnnnnnnnnnnnnnnnnnnnnnnnnnnnnnnnnnnnnnnnnnnnnnnnnnnnnnnnnnnnnnnnnnnnnnnnnnnnnnnnnnnnnnnnnnnnnnnnnnnnnnnnnnnnnnnnnnnnnnnnnnnnnnnnnnnnnnnnnnnnnnnnnnnnnnnnnnnnnnnnnnnnnnnnnnnnnnnnnnnnnnnnnnnnnnnnnnnnnnnnnnnnnnnnnnnnnnnnnnnnnnnnnnnnnnnnnnnnnnnnnnnnnnnnnnnnnnnnnnnnnnnnnnnnnnnnnnnnnnnnnnnnnnnnnnnnnnnnnnnnnnnnnnnnnnnnnnnnnnnnnnnnnnnnnnnnnnnnnnnnnnnnnnnnnnnnnnnnnnnnnnnnnnnnnnnnnnnnnnnnnnnnnnnnnnnnnnnnnnnnnnnnnnnnnnnnnnnnnnnnnnnnnnnnnnnnnnnnnnnnnnnnnnnnnnnnnnnnnnnnnnnnnnnnnnnnnnnnnnnnnnnnnnnnnnnnnnnnnnnnnnnnnnnnnnnnnnnnnnnnnnnnnnnnnnnnnnnnnnnnnnnnnnnnnnnnnnnnnnnnnnnnnnnnnnnnnnnnnnnnnnnnnnnnnnnnnnnnnnnnnnnnnnnnnnnnnnnnnnnnnnnnnnnnnnnnnnnnnnnnnnnnnnnnnnnnnnnnnnnnnnnnnnnnnnnnnnnnnnnnnnnnnnnnnnnnnnnnnnnnnnnnnnnnnnnnnnnnnnnnnnnnnnnnnnnnnnnnnnnnnnnnnnnnnnnnnnnnnnnnnnnnnnnnnnnnnnnnnnnnnnnnnnnnnnnnnnnnnnnnnnnnnnnnnnnnnnnnnnnnnnnnnnnnnnnnnnnnnnnnnnnnnnnnnnnnnnnnnnnnnnnnnnnnnnnnnnnnnnnnnnnnnnnnnnnnnnnnnnnnnnnnnnnnnnnnnnnnnnnnnnnnnnnnnnnnnnnnnnnnnnnnnnnnnnnnnnnnnnnnnnnnnnnnnnnnnnnnnnnnnnnnnnnnnnnnnnnnnnnnnnnnnnnnnnnnnnnnnnnnnnnnnnnnnnnnnnnnnnnnnnnnnnnnnnnnnnnnnnnnnnnnnnnnnnnnnnnnnnnnnnnnnnnnnnnnnnnnnnnnnnnnnnnnnnnnnnnnnnnnnnnnnnnnnnnnnnnnnnnnnnnnnnnnnnnnnnnnnnnnnnnnnnnnnnnnnnnnnnnnnnnnnnnnnnnnnnnnnnnnnnnnnnnnnnnnnnnnnnnnnnnnnnnnnnnnnnnnnnnnnnnnnnnnnnnnnnnnnnnnnnnnnnnnnnnnnnnnnnnnnnnnnnnnnnnnnnnnnnnnnnnnnnnnnnnnnnnnnnnnnnnnnnnnnnnnnnnnnnnnnnnnnnnnnnnnnnnnnnnnnnnnnnnnnnnnnnnnnnnnnnnnnnnnnnnnnnnnnnnnnnnnnnnnnnnnnnnnnnnnnnnnnnnnnnnnnnnnnnnnnnnnnnnnnnnnnnnnnnnnnnnnnnnnnnnnnnnnnnnnnnnnnnnnnnnnnnnnnnnnnnnnnnnnnnnnnnnnnnnnnnnnnnnnnnnnnnnnnnnnnnnnnnnnnnnnnnnnnnnnnnnnnnnnnnnnnnnnnnnnnnnnnnnnnnnnnnnnnnnnnnnnnnnnnnnnnnnnnnnnnnnnnnnnnnnnnnnnnnnnnnnnnnnnnnnnnnnnnnnnnnnnnnnnnnnnnnnnnnnnnnnnnnnnnnnnnnnnnnnnnnnnnnnnnnnnnnnnnnnnnnnnnnnnnnnnnnnnnnnnnnnnnnnnnnnnnnnnnnnnnnnnnnnnnnnnnnnnnnnnnnnnnnnnnnnnnnnnnnnnnnnnnnnnnnnnnnnnnnnnnnnnnnnnnnnnnnnnnnnnnnnnnnnnnnnnnnnnnnnnnnnnnnnnnnnnnnnnnnnnnnnnnnnnnnnnnnnnnnnnnnnnnnnnnnnnnnnnnnnnnnnnnnnnnnnnnnnnnnnnnnnnnnnnnnnnnnnnnnnnnnnnnnnnnnnnnnnnnnnnnnnnnnnnnnnnnnnnnnnnnnnnnnnnnnnnnnnnnnnnnnnnnnnnnnnnnnnnnnnnnnnnnnnnnnnnnnnnnnnnnnnnnnnnnnnnnnnnnnnnnnnnnnnnnnnnnnnnnnnnnnnnnnnnnnnnnnnnnnnnnnnnnnnnnnnnnnnnnnnnnnnnnnnnnnnnnnnnnnnnnnnnnnnnnnnnnnnnnnnnnnnnnnnnnnnnnnnnnnnnnnnnnnnnnnnnnnnnnnnnnnnnnnnnnnnnnnnnnnnnnnnnnnnnnnnnnnnnnnnnnnnnnnnnnnnnnnnnnnnnnnnnnnnnnnnnnnnnnnnnnnnnnnnnnnnnnnnnnnnnnnnnnnnnnnnnnnnnnnnnnnnnnnnnnnnnnnnnnnnnnnnnnnnnnnnnnnnnnnnnnnnnnnnnnnnnnnnnnnnnnnnnnnnnnnnnnnnnnnnnnnnnnnnnnnnnnnnnnnnnnnnnnnnnnnnnnnnnnnnnnnnnnnnnnnnnnnnnnnnnnnnnnnnnnnnnnnnnnnnnnnnnnnnnnnnnnnnnnnnnnnnnnnnnnnnnnnnnnnnnnnnnnnnnnnnnnnnnnnnnnnnnnnnnnnnnnnnnnnnnnnnnnnnnnnnnnnnnnnnnnnnnnnnnnnnnnnnnnnnnnnnnnnnnnnnnnnnnnnnnnnnnnnnnnnnnnnnnnnnnnnnnnnnnnnnnnnnnnnnnnnnnnnnnnnnnnnnnnnnnnnnnnnnnnnnnnnnnnnnnnnnnnnnnnnnnnnnnnnnnnnnnnnnnnnnnnnnnnnnnnnnnnnnnnnnnnnnnnnnnnnnnnnnnnnnnnnnnnnnnnnnnnnnnnnnnnnnnnnnnnnnnnnnnnnnnnnnnnnnnnnnnnnnnnnnnnnnnnnnnnnnnnnnnnnnnnnnnnnnnnnnnnnnnnnnnnnnnnnnnnnnnnnnnnnnnnnnnnnnnnnnnnnnnnnnnnnnnnnnnnnnnnnnnnnnnnnnnnnnnnnnnnnnnnnnnnnnnnnnnnnnnnnnnnnnnnnnnnnnnnnnnnnnnnnnnnnnnnnnnnnnnnnnnnnnnnnnnnnnnnnnnnnnnnnnnnnnnnnnnnnnnnnnnnnnnnnnnnnnnnnnnnnnnnnnnnnnnnnnnnnnnnnnnnnnnnnnnnnnnnnnnnnnnnnnnnnnnnnnnnnnnnnnnnnnnnnnnnnnnnnnnnnnnnnnnnnnnnnnnnnnnnnnnnnnnnnnnnnnnnnnnnnnnnnnnnnnnnnnnnnnnnnnnnnnnnnnnnnnnnnnnnnnnnnnnnnnnnnnnnnnnnnnnnnnnnnnnnnnnnnnnnnnnnnnnnnnnnnnnnnnnnnnnnnnnnnnnnnnnnnnnnnnnnnnnnnnnnnnnnnnnnnnnnnnnnnnnnnnnnnnnnnnnnnnnnnnnnnnnnnnnnnnnnnnnnnnnnnnnnnnnnnnnnnnnnnnnnnnnnnnnnnnnnnnnnnnnnnnnnnnnnnnnnnnnnnnnnnnnnnnnnnnnnnnnnnnnnnnnnnnnnnnnnnnnnnnnnnnnnnnnnnnnnnnnnnnnnnnnnnnnnnnnnnnnnnnnnnnnnnnnnnnnnnnnnnnnnnnnnnnnnnnnnnnnnnnnnnnnnnnnnnnnnnnnnnnnnnnnnnnnnnnnnnnnnnnnnnnnnnnnnnnnnnnnnnnnnnnnnnnnnnnnnnnnnnnnnnnnnnnnnnnnnnnnnnnnnnnnnnnnnnnnnnnnnnnnnnnnnnnnnnnnnnnnnnnnnnnnnnnnnnnnnnnnnnnnnnnnnnnnnnnnnnnnnnnnnnnnnnnnnnnnnnnnnnnnnnnnnnnnnnnnnnnnnnnnnnnnnnnnnnnnnnnnnnnnnnnnnnnnnnnnnnnnnnnnnnnnnnnnnnnnnnnnnnnnnnnnnnnnnnnnnnnnnnnnnnnnnnnnnnnnnnnnnnnnnnnnnnnnnnnnnnnnnnnnnnnnnnnnnnnnnnnnnnnnnnnnnnnnnnnnnnnnnnnnnnnnnnnnnnnnnnnnnnnnnnnnnnnnnnnnnnnnnnnnnnnnnnnnnnnnnnnnnnnnnnnnnnnnnnnnnnnnnnnnnnnnnnnnnnnnnnnnnnnnnnnnnnnnnnnnnnnnnnnnnnnnnnnnnnnnnnnnnnnnnnnnnnnnnnnnnnnnnnnnnnnnnnnnnnnnnnnnnnnnnnnnnnnnnnnnnnnnnnnnnnnnnnnnnnnnnnnnnnnnnnnnnnnnnnnnnnnnnnnnnnnnnnnnnnnnnnnnnnnnnnnnnnnnnnnnnnnnnnnnnnnnnnnnnnnnnnnnnnnnnnnnnnnnnnnnnnnnnnnnnnnnnnnnnnnnnnnnnnnnnnnnnnnnnnnnnnnnnnnnnnnnnnnnnnnnnnnnnnnnnnnnnnnnnnnnnnnnnnnnnnnnnnnnnnnnnnnnnnnnnnnnnnnnnnnnnnnnnnnnnnnnnnnnnnnnnnnnnnnnnnnnnnnnnnnnnnnnnnnnnnnnnnnnnnnnnnnnnnnnnnnnnnnnnnnnnnnnnnnnnnnnnnnnnnnnnnnnnnnnnnnnnnnnnnnnnnnnnnnnnnnnnnnnnnnnnnnnnnnnnnnnnnnnnnnnnnnnnnnnnnnnnnnnnnnnnnnnnnnnnnnnnnnnnnnnnnnnnnnnnnnnnnnnnnnnnnnnnnnnnnnnnnnnnnnnnnnnnnnnnnnnnnnnnnnnnnnnnnnnnnnnnnnnnnnnnnnnnnnnnnnnnnnnnnnnnnnnnnnnnnnnnnnnnnnnnnnnnnnnnnnnnnnnnnnnnnnnnnnnnnnnnnnnnnnnnnnnnnnnnnnnnnnnnnnnnnnnnnnnnnnnnnnnnnnnnnnnnnnnnnnnnnnnnnnnnnnnnnnnnnnnnnnnnnnnnnnnnnnnnnnnnnnnnnnnnnnnnnnnnnnnnnnnnnnnnnnnnnnnnnnnnnnnnnnnnnnnnnnnnnnnnnnnnnnnnnnnnnnnnnnnnnnnnnnnnnnnnnnnnnnnnnnnnnnnnnnnnnnnnnnnnnnnnnnnnnnnnnnnnnnnnnnnnnnnnnnnnnnnnnnnnnnnnnnnnnnnnnnnnnnnnnnnnnnnnnnnnnnnnnnnnnnnnnnnnnnnnnnnnnnnnnnnnnnnnnnnnnnnnnnnnnnnnnnnnnnnnnnnnnnnnnnnnnnnnnnnnnnnnnnnnnnnnnnnnnnnnnnnnnnnnnnnnnnnnnnnnnnnnnnnnnnnnnnnnnnnnnnnnnnnnnnnnnnnnnnnnnnnnnnnnnnnnnnnnnnnnnnnnnnnnnnnnnnnnnnnnnnnnnnnnnnnnnnnnnnnnnnnnnnnnnnnnnnnnnnnnnnnnnnnnnnnnnnnnnnnnnnnnnnnnnnnnnnnnnnnnnnnnnnnnnnnnnnnnnnnnnnnnnnnnnnnnnnnnnnnnnnnnnnnnnnnnnnnnnnnnnnnnnnnnnnnnnnnnnnnnnnnnnnnnnnnnnnnnnnnnnnnnnnnnnnnnnnnnnnnnnnnnnnnnnnnnnnnnnnnnnnnnnnnnnnnnnnnnnnnnnnnnnnnnnnnnnnnnnnnnnnnnnnnnnnnnnnnnnnnnnnnnnnnnnnnnnnnnnnnnnnnnnnnnnnnnnnnnnnnnnnnnnnnnnnnnnnnnnnnnnnnnnnnnnnnnnnnnnnnnnnnnnnnnnnnnnnnnnnnnnnnnnnnnnnnnnnnnnnnnnnnnnnnnnnnnnnnnnnnnnnnnnnnnnnnnnnnnnnnnnnnnnnnnnnnnnnnnnnnnnnnnnnnnnnnnnnnnnnnnnnnnnnnnnnnnnnnnnnnnnnnnnnnnnnnnnnnnnnnnnnnnnnnnnnnnnnnnnnnnnnnnnnnnnnnnnnnnnnnnnnnnnnnnnnnnnnnnnnnnnnnnnnnnnnnnnnnnnnnnnnnnnnnnnnnnnnnnnnnnnnnnnnnnnnnnnnnnnnnnnnnnnnnnnnnnnnnnnnnnnnnnnnnnnnnnnnnnnnnnnnnnnnnnnnnnnnnnnnnnnnnnnnnnnnnnnnnnnnnnnnnnnnnnnnnnnnnnnnnnnnnnnnnnnnnnnnnnnnnnnnnnnnnnnnnnnnnnnnnnnnnnnnnnnnnnnnnnnnnnnnnnnnnnnnnnnnnnnnnnnnnnnnnnnnnnnnnnnnnnnnnnnnnnnnnnnnnnnnnnnnnnnnnnnnnnnnnnnnnnnnnnnnnnnnnnnnnnnnnnnnnnnnnnnnnnnnnnnnnnnnnnnnnnnnnnnnnnnnnnnnnnnnnnnnnnnnnnnnnnnnnnnnnnnnnnnnnnnnnnnnnnnnnnnnnnnnnnnnnnnnnnnnnnnnnnnnnnnnnnnnnnnnnnnnnnnnnnnnnnnnnnnnnnnnnnnnnnnnnnnnnnnnnnnnnnnnnnnnnnnnnnnnnnnnnnnnnnnnnnnnnnnnnnnnnnnnnnnnnnnnnnnnnnnnnnnnnnnnnnnnnnnnnnnnnnnnnnnnnnnnnnnnnnnnnnnnnnnnnnnnnnnnnnnnnnnnnnnnnnnnnnnnnnnnnnnnnnnnnnnnnnnnnnnnnnnnnnnnnnnnnnnnnnnnnnnnnnnnnnnnnnnnnnnnnnnnnnnnnnnnnnnnnnnnnnnnnnnnnnnnnnnnnnnnnnnnnnnnnnnnnnnnnnnnnnnnnnnnnnnnnnnnnnnnnnnnnnnnnnnnnnnnnnnnnnnnnnnnnnnnnnnnnnnnnnnnnnnnnnnnnnnnnnnnnnnnnnnnnnnnnnnnnnnnnnnnnnnnnnnnnnnnnnnnnnnnnnnnnnnnnnnnnnnnnnnnnnnnnnnnnnnnnnnnnnnnnnnnnnnnnnnnnnnnnnnnnnnnnnnnnnnnnnnnnnnnnnnnnnnnnnnnnnnnnnnnnnnnnnnnnnnnnnnnnnnnnnnnnnnnnnnnnnnnnnnnnnnnnnnnnnnnnnnnnnnnnnnnnnnnnnnnnnnnnnnnnnnnnnnnnnnnnnnnnnnnnnnnnnnnnnnnnnnnnnnnnnnnnnnnnnnnnnnnnnnnnnnnnnnnnnnnnnnnnnnnnnnnnnnnnnnnnnnnnnnnnnnnnnnnnnnnnnnnnnnnnnnnnnnnnnnnnnnnnnnnnnnnnnnnnnnnnnnnnnnnnnnnnnnnnnnnnnnnnnnnnnnnnnnnnnnnnnnnnnnnnnnnnnnnnnnnnnnnnnnnnnnnnnnnnnnnnnnnnnnnnnnnnnnnnnnnnnnnnnnnnnnnnnnnnnnnnnnnnnnnnnnnnnnnnnnnnnnnnnnnnnnnnnnnnnnnnnnnnnnnnnnnnnnnnnnnnnnnnnnnnnnnnnnnnnnnnnnnnnnnnnnnnnnnnnnnnnnnnnnnnnnnnnnnnnnnnnnnnnnnnnnnnnnnnnnnnnnnnnnnnnnnnnnnnnnnnnnnnnnnnnnnnnnnnnnnnnnnnnnnnnnnnnnnnnnnnnnnnnnnnnnnnnnnnnnnnnnnnnnnnnnnnnnnnnnnnnnnnnnnnnnnnnnnnnnnnnnnnnnnnnnnnnnnnnnnnnnnnnnnnnnnnnnnnnnnnnnnnnnnnnnnnnnnnnnnnnnnnnnnnnnnnnnnnnnnnnnnnnnnnnnnnnnnnnnnnnnnnnnnnnnnnnnnnnnnnnnnnnnnnnnnnnnnnnnnnnnnnnnnnnnnnnnnnnnnnnnnnnnnnnnnnnnnnnnnnnnnnnnnnnnnnnnnnnnnnnnnnnnnnnnnnnnnnnnnnnnnnnnnnnnnnnnnnnnnnnnnnnnnnnnnnnnnnnnnnnnnnnnnnnnnnnnnnnnnnnnnnnnnnnnnnnnnnnnnnnnnnnnnnnnnnnnnnnnnnnnnnnnnnnnnnnnnnnnnnnnnnnnnnnnnnnnnnnnnnnnnnnnnnnnnnnnnnnnnnnnnnnnnnnnnnnnnnnnnnnnnnnnnnnnnnnnnnnnnnnnnnnnnnnnnnnnnnnnnnnnnnnnnnnnnnnnnnnnnnnnnnnnnnnnnnnnnnnnnnnnnnnnnnnnnnnnnnnnnnnnnnnnnnnnnnnnnnnnnnnnnnnnnnnnnnnnnnnnnnnnnnnnnnnnnnnnnnnnnnnnnnnnnnnnnnnnnnnnnnnnnnnnnnnnnnnnnnnnnnnnnnnnnnnnnnnnnnnnnnnnnnnnnnnnnnnnnnnnnnnnnnnnnnnnnnnnnnnnnnnnnnnnnnnnnnnnnnnnnnnnnnnnnnnnnnnnnnnnnnnnnnnnnnnnnnnnnnnnnnnnnnnnnnnnnnnnnnnnnnnnnnnnnnnnnnnnnnnnnnnnnnnnnnnnnnnnnnnnnnnnnnnnnnnnnnnnnnnnnnnnnnnnnnnnnnnnnnnnnnnnnnnnnnnnnnnnnnnnnnnnnnnnnnnnnnnnnnnnnnnnnnnnnnnnnnnnnnnnnnnnnnnnnnnnnnnnnnnnnnnnnnnnnnnnnnnnnnnnnnnnnnnnnnnnnnnnnnnnnnnnnnnnnnnnnnnnnnnnnnnnnnnnnnnnnnnnnnnnnnnnnnnnnnnnnnnnnnnnnnnnnnnnnnnnnnnnnnnnnnnnnnnnnnnnnnnnnnnnnnnnnnnnnnnnnnnnnnnnnnnnnnnnnnnnnnnnnnnnnnnnnnnnnnnnnnnnnnnnnnnnnnnnnnnnnnnnnnnnnnnnnnnnnnnnnnnnnnnnnnnnnnnnnnnnnnnnnnnnnnnnnnnnnnnnnnnnnnnnnnnnnnnnnnnnnnnnnnnnnnnnnnnnnnnnnnnnnnnnnnnnnnnnnnnnnnnnnnnnnnnnnnnnnnnnnnnnnnnnnnnnnnnnnnnnnnnnnnnnnnnnnnnnnnnnnnnnnnnnnnnnnnnnnnnnnnnnnnnnnnnnnnnnnnnnnnnnnnnnnnnnnnnnnnnnnnnnnnnnnnnnnnnnnnnnnnnnnnnnnnnnnnnnnnnnnnnnnnnnnnnnnnnnnnnnnnnnnnnnnnnnnnnnnnnnnnnnnnnnnnnnnnnnnnnnnnnnnnnnnnnnnnnnnnnnnnnnnnnnnnnnnnnnnnnnnnnnnnnnnnnnnnnnnnnnnnnnnnnnnnnnnnnnnnnnnnnnnnnnnnnnnnnnnnnnnnnnnnnnnnnnnnnnnnnnnnnnnnnnnnnnnnnnnnnnnnnnnnnnnnnnnnnnnnnnnnnnnnnnnnnnnnnnnnnnnnnnnnnnnnnnnnnnnnnnnnnnnnnnnnnnnnnnnnnnnnnnnnnnnnnnnnnnnnnnnnnnnnnnnnnnnnnnnnnnnnnnnnnnnnnnnnnnnnnnnnnnnnnnnnnnnnnnnnnnnnnnnnnnnnnnnnnnnnnnnnnnnnnnnnnnnnnnnnnnnnnnnnnnnnnnnnnnnnnnnnnnnnnnnnnnnnnnnnnnnnnnnnnnnnnnnnnnnnnnnnnnnnnnnnnnnnnnnnnnnnnnnnnnnnnnnnnnnnnnnnnnnnnnnnnnnnnnnnnnnnnnnnnnnnnnnnnnnnnnnnnnnnnnnnnnnnnnnnnnnnnnnnnnnnnnnnnnnnnnnnnnnnnnnnnnnnnnnnnnnnnnnnnnnnnnnnnnnnnnnnnnnnnnnnnnnnnnnnnnnnnnnnnnnnnnnnnnnnnnnnnnnnnnnnnnnnnnnnnnnnnnnnnnnnnnnnnnnnnnnnnnnnnnnnnnnnnnnnnnnnnnnnnnnnnnnnnnnnnnnnnnnnnnnnnnnnnnnnnnnnnnnnnnnnnnnnnnnnnnnnnnnnnnnnnnnnnnnnnnnnnnnnnnnnnnnnnnnnnnnnnnnnnnnnnnnnnnnnnnnnnnnnnnnnnnnnnnnnnnnnnnnnnnnnnnnnnnnnnnnnnnnnnnnnnnnnnnnnnnnnnnnnnnnnnnnnnnnnnnnnnnnnnnnnnnnnnnnnnnnnnnnnnnnnnnnnnnnnnnnnnnnnnnnnnnnnnnnnnnnnnnnnnnnnnnnnnnnnnnnnnnnnnnnnnnnnnnnnnnnnnnnnnnnnnnnnnnnnnnnnnnnnnnnnnnnnnnnnnnnnnnnnnnnnnnnnnnnnnnnnnnnnnnnnnnnnnnnnnnnnnnnnnnnnnnnnnnnnnnnnnnnnnnnnnnnnnnnnnnnnnnnnnnnnnnnnnnnnnnnnnnnnnnnnnnnnnnnnnnnnnnnnnnnnnnnnnnnnnnnnnnnnnnnnnnnnnnnnnnnnnnnnnnnnnnnnnnnnnnnnnnnnnnnnnnnnnnnnnnnnnnnnnnnnnnnnnnnnnnnnnnnnnnnnnnnnnnnnnnnnnnnnnnnnnnnnnnnnnnnnnnnnnnnnnnnnnnnnnnnnnnnnnnnnnnnnnnnnnnnnnnnnnnnnnnnnnnnnnnnnnnnnnnnnnnnnnnnnnnnnnnnnnnnnnnnnnnnnnnnnnnnnnnnnnnnnnnnnnnnnnnnnnnnnnnnnnnnnnnnnnnnnnnnnnnnnnnnnnnnnnnnnnnnnnnnnnnnnnnnnnnnnnnnnnnnnnnnnnnnnnnnnnnnnnnnnnnnnnnnnnnnnnnnnnnnnnnnnnnnnnnnnnnnnnnnnnnnnnnnnnnnnnnnnnnnnnnnnnnnnnnnnnnnnnnnnnnnnnnnnnnnnnnnnnnnnnnnnnnnnnnnnnnnnnnnnnnnnnnnnnnnnnnnnnnnnnnnnnnnnnnnnnnnnnnnnnnnnnnnnnnnnnnnnnnnnnnnnnnnnnnnnnnnnnnnnnnnnnnnnnnnnnnnnnnnnnnnnnnnnnnnnnnnnnnnnnnnnnnnnnnnnnnnnnnnnnnnnnnnnnnnnnnnnnnnnnnnnnnnnnnnnnnnnnnnnnnnnnnnnnnnnnnnnnnnnnnnnnnnnnnnnnnnnnnnnnnnnnnnnnnnnnnnnnnnnnnnnnnnnnnnnnnnnnnnnnnnnnnnnnnnnnnnnnnnnnnnnnnnnnnnnnnnnnnnnnnnnnnnnnnnnnnnnnnnnnnnnnnnnnnnnnnnnnnnnnnnnnnnnnnnnnnnnnnnnnnnnnnnnnnnnnnnnnnnnnnnnnnnnnnnnnnnnnnnnnnnnnnnnnnnnnnnnnnnnnnnnnnnnnnnnnnnnnnnnnnnnnnnnnnnnnnnnnnnnnnnnnnnnnnnnnnnnnnnnnnnnnnnnnnnnnnnnnnnnnnnnnnnnnnnnnnnnnnnnnnnnnnnnnnnnnnnnnnnnnnnnnnnnnnnnnnnnnnnnnnnnnnnnnnnnnnnnnnnnnnnnnnnnnnnnnnnnnnnnnnnnnnnnnnnnnnnnnnnnnnnnnnnnnnnnnnnnnnnnnnnnnnnnnnnnnnnnnnnnnnnnnnnnnnnnnnnnnnnnnnnnnnnnnnnnnnnnnnnnnnnnnnnnnnnnnnnnnnnnnnnnnnnnnnnnnnnnnnnnnnnnnnnnnnnnnnnnnnnnnnnnnnnnnnnnnnnnnnnnnnnnnnnnnnnnnnnnnnnnnnnnnnnnnnnnnnnnnnnnnnnnnnnnnnnnnnnnnnnnnnnnnnnnnnnnnnnnnnnnnnnnnnnnnnnnnnnnnnnnnnnnnnnnnnnnnnnnnnnnnnnnnnnnnnnnnnnnnnnnnnnnnnnnnnnnnnnnnnnnnnnnnnnnnnnnnnnnnnnnnnnnnnnnnnnnnnnnnnnnnnnnnnnnnnnnnnnnnnnnnnnnnnnnnnnnnnnnnnnnnnnnnnnnnnnnnnnnnnnnnnnnnnnnnnnnnnnnnnnnnnnnnnnnnnnnnnnnnnnnnnnnnnnnnnnnnnnnnnnnnnnnnnnnnnnnnnnnnnnnnnnnnnnnnnnnnnnnnnnnnnnnnnnnnnnnnnnnnnnnnnnnnnnnnnnnnnnnnnnnnnnnnnnnnnnnnnnnnnnnnnnnnnnnnnnnnnnnnnnnnnnnnnnnnnnnnnnnnnnnnnnnnnnnnnnnnnnnnnnnnnnnnnnnnnnnnnnnnnnnnnnnnnnnnnnnnnnnnnnnnnnnnnnnnnnnnnnnnnnnnnnnnnnnnnnnnnnnnnnnnnnnnnnnnnnnnnnnnnnnnnnnnnnnnnnnnnnnnnnnnnnnnnnnnnnnnnnnnnnnnnnnnnnnnnnnnnnnnnnnnnnnnnnnnnnnnnnnnnnnnnnnnnnnnnnnnnnnnnnnnnnnnnnnnnnnnnnnnnnnnnnnnnnnnnnnnnnnnnnnnnnnnnnnnnnnnnnnnnnnnnnnnnnnnnnnnnnnnnnnnnnnnnnnnnnnnnnnnnnnnnnnnnnnnnnnnnnnnnnnnnnnnnnnnnnnnnnnnnnnnnnnnnnnnnnnnnnnnnnnnnnnnnnnnnnnnnnnnnnnnnnnnnnnnnnnnnnnnnnnnnnnnnnnnnnnnnnnnnnnnnnnnnnnnnnnnnnnnnnnnnnnnnnnnnnnnnnnnnnnnnnnnnnnnnnnnnnnnnnnnnnnnnnnnnnnnnnnnnnnnnnnnnnnnnnnnnnnnnnnnnnnnnnnnnnnnnnnnnnnnnnnnnnnnnnnnnnnnnnnnnnnnnnnnnnnnnnnnnnnnnnnnnnnnnnnnnnnnnnnnnnnnnnnnnnnnnnnnnnnnnnnnnnnnnnnnnnnnnnnnnnnnnnnnnnnnnnnnnnnnnnnnnnnnnnnnnnnnnnnnnnnnnnnnnnnnnnnnnnnnnnnnnnnnnnnnnnnnnnnnnnnnnnnnnnnnnnnnnnnnnnnnnnnnnnnnnnnnnnnnnnnnnnnnnnnnnnnnnnnnnnnnnnnnnnnnnnnnnnnnnnnnnnnnnnnnnnnnnnnnnnnnnnnnnnnnnnnnnnnnnnnnnnnnnnnnnnnnnnnnnnnnnnnnnnnnnnnnnnnnnnnnnnnnnnnnnnnnnnnnnnnnnnnnnnnnnnnnnnnnnnnnnnnnnnnnnnnnnnnnnnnnnnnnnnnnnnnnnnnnnnnnnnnnnnnnnnnnnnnnnnnnnnnnnnnnnnnnnnnnnnnnnnnnnnnnnnnnnnnnnnnnnnnnnnnnnnnnnnnnnnnnnnnnnnnnnnnnnnnnnnnnnnnnnnnnnnnnnnnnnnnnnnnnnnnnnnnnnnnnnnnnnnnnnnnnnnnnnnnnnnnnnnnnnnnnnnnnnnnnnnnnnnnnnnnnnnnnnnnnnnnnnnnnnnnnnnnnnnnnnnnnnnnnnnnnnnnnnnnnnnnnnnnnnnnnnnnnnnnnnnnnnnnnnnnnnnnnnnnnnnnnnnnnnnnnnnnnnnnnnnnnnnnnnnnnnnnnnnnnnnnnnnnnnnnnnnnnnnnnnnnnnnnnnnnnnnnnnnnnnnnnnnnnnnnnnnnnnnnnnnnnnnnnnnnnnnnnnnnnnnnnnnnnnnnnnnnnnnnnnnnnnnnnnnnnnnnnnnnnnnnnnnnnnnnnnnnnnnnnnnnnnnnnnnnnnnnnnnnnnnnnnnnnnnnnnnnnnnnnnnnnnnnnnnnnnnnnnnnnnnnnnnnnnnnnnnnnnnnnnnnnnnnnnnnnnnnnnnnnnnnnnnnnnnnnnnnnnnnnnnnnnnnnnnnnnnnnnnnnnnnnnnnnnnnnnnnnnnnnnnnnnnnnnnnnnnnnnnnnnnnnnnnnnnnnnnnnnnnnnnnnnnnnnnnnnnnnnnnnnnnnnnnnnnnnnnnnnnnnnnnnnnnnnnnnnnnnnnnnnnnnnnnnnnnnnnnnnnnnnnnnnnnnnnnnnnnnnnnnnnnnnnnnnnnnnnnnnnnnnnnnnnnnnnnnnnnnnnnnnnnnnnnnnnnnnnnnnnnnnnnnnnnnnnnnnnnnnnnnnnnnnnnnnnnnnnnnnnnnnnnnnnnnnnnnnnnnnnnnnnnnnnnnnnnnnnnnnnnnnnnnnnnnnnnnnnnnnnnnnnnnnnnnnnnnnnnnnnnnnnnnnnnnnnnnnnnnnnnnnnnnnnnnnnnnnnnnnnnnnnnnnnnnnnnnnnnnnnnnnnnnnnnnnnnnnnnnnnnnnnnnnnnnnnnnnnnnnnnnnnnnnnnnnnnnnnnnnnnnnnnnnnnnnnnnnnnnnnnnnnnnnnnnnnnnnnnnnnnnnnnnnnnnnnnnnnnnnnnnnnnnnnnnnnnnnnnnnnnnnnnnnnnnnnnnnnnnnnnnnnnnnnnnnnnnnnnnnnnnnnnnnnnnnnnnnnnnnnnnnnnnnnnnnnnnnnnnnnnnnnnnnnnnnnnnnnnnnnnnnnnnnnnnnnnnnnnnnnnnnnnnnnnnnnnnnnnnnnnnnnnnnnnnnnnnnnnnnnnnnnnnnnnnnnnnnnnnnnnnnnnnnnnnnnnnnnnnnnnnnnnnnnnnnnnnnnnnnnnnnnnnnnnnnnnnnnnnnnnnnnnnnnnnnnnnnnnnnnnnnnnnnnnnnnnnnnnnnnnnnnnnnnnnnnnnnnnnnnnnnnnnnnnnnnnnnnnnnnnnnnnnnnnnnnnnnnnnnnnnnnnnnnnnnnnnnnnnnnnnnnnnnnnnnnnnnnnnnnnnnnnnnnnnnnnnnnnnnnnnnnnnnnnnnnnnnnnnnnnnnnnnnnnnnnnnnnnnnnnnnnnnnnnnnnnnnnnnnnnnnnnnnnnnnnnnnnnnnnnnnnnnnnnnnnnnnnnnnnnnnnnnnnnnnnnnnnnnnnnnnnnnnnnnnnnnnnnnnnnnnnnnnnnnnnnnnnnnnnnnnnnnnnnnnnnnnnnnnnnnnnnnnnnnnnnnnnnnnnnnnnnnnnnnnnnnnnnnnnnnnnnnnnnnnnnnnnnnnnnnnnnnnnnnnnnnnnnnnnnnnnnnnnnnnnnnnnnnnnnnnnnnnnnnnnnnnnnnnnnnnnnnnnnnnnnnnnnnnnnnnnnnnnnnnnnnnnnnnnnnnnnnnnnnnnnnnnnnnnnnnnnnnnnnnnnnnnnnnnnnnnnnnnnnnnnnnnnnnnnnnnnnnnnnnnnnnnnnnnnnnnnnnnnnnnnnnnnnnnnnnnnnnnnnnnnnnnnnnnnnnnnnnnnnnnnnnnnnnnnnnnnnnnnnnnnnnnnnnnnnnnnnnnnnnnnnnnnnnnnnnnnnnnnnnnnnnnnnnnnnnnnnnnnnnnnnnnnnnnnnnnnnnnnnnnnnnnnnnnnnnnnnnnnnnnnnnnnnnnnnnnnnnnnnnnnnnnnnnnnnnnnnnnnnnnnnnnnnnnnnnnnnnnnnnnnnnnnnnnnnnnnnnnnnnnnnnnnnnnnnnnnnnnnnnnnnnnnnnnnnnnnnnnnnnnnnnnnnnnnnnnnnnnnnnnnnnnnnnnnnnnnnnnnnnnnnnnnnnnnnnnnnnnnnnnnnnnnnnnnnnnnnnnnnnnnnnnnnnnnnnnnnnnnnnnnnnnnnnnnnnnnnnnnnnnnnnnnnnnnnnnnnnnnnnnnnnnnnnnnnnnnnnnnnnnnnnnnnnnnnnnnnnnnnnnnnnnnnnnnnnnnnnnnnnnnnnnnnnnnnnnnnnnnnnnnnnnnnnnnnnnnnnnnnnnnnnnnnnnnnnnnnnnnnnnnnnnnnnnnnnnnnnnnnnnnnnnnnnnnnnnnnnnnnnnnnnnnnnnnnnnnnnnnnnnnnnnnnnnnnnnnnnnnnnnnnnnnnnnnnnnnnnnnnnnnnnnnnnnnnnnnnnnnnnnnnnnnnnnnnnnnnnnnnnnnnnnnnnnnnnnnnnnnnnnnnnnnnnnnnnnnnnnnnnnnnnnnnnnnnnnnnnnnnnnnnnnnnnnnnnnnnnnnnnnnnnnnnnnnnnnnnnnnnnnnnnnnnnnnnnnnnnnnnnnnnnnnnnnnnnnnnnnnnnnnnnnnnnnnnnnnnnnnnnnnnnnnnnnnnnnnnnnnnnnnnnnnnnnnnnnnnnnnnnnnnnnnnnnnnnnnnnnnnnnnnnnnnnnnnnnnnnnnnnnnnnnnnnnnnnnnnnnnnnnnnnnnnnnnnnnnnnnnnnnnnnnnnnnnnnnnnnnnnnnnnnnnnnnnnnnnnnnnnnnnnnnnnnnnnnnnnnnnnnnnnnnnnnnnnnnnnnnnnnnnnnnnnnnnnnnnnnnnnnnnnnnnnnnnnnnnnnnnnnnnnnnnnnnnnnnnnnnnnnnnnnnnnnnnnnnnnnnnnnnnnnnnnnnnnnnnnnnnnnnnnnnnnnnnnnnnnnnnnnnnnnnnnnnnnnnnnnnnnnnnnnnnnnnnnnnnnnnnnnnnnnnnnnnnnnnnnnnnnnnnnnnnnnnnnnnnnnnnnnnnnnnnnnnnnnnnnnnnnnnnnnnnnnnnnnnnnnnnnnnnnnnnnnnnnnnnnnnnnnnnnnnnnnnnnnnnnnnnnnnnnnnnnnnnnnnnnnnnnnnnnnnnnnnnnnnnnnnnnnnnnnnnnnnnnnnnnnnnnnnnnnnnnnnnnnnnnnnnnnnnnnnnnnnnnnnnnnnnnnnnnnnnnnnnnnnnnnnnnnnnnnnnnnnnnnnnnnnnnnnnnnnnnnnnnnnnnnnnnnnnnnnnnnnnnnnnnnnnnnnnnnnnnnnnnnnnnnnnnnnnnnnnnnnnnnnnnnnnnnnnnnnnnnnnnnnnnnnnnnnnnnnnnnnnnnnnnnnnnnnnnnnnnnnnnnnnnnnnnnnnnnnnnnnnnnnnnnnnnnnnnnnnnnnnnnnnnnnnnnnnnnnnnnnnnnnnnnnnnnnnnnnnnnnnnnnnnnnnnnnnnnnnnnnnnnnnnnnnnnnnnnnnnnnnnnnnnnnnnnnnnnnnnnnnnnnnnnnnnnnnnnnnnnnnnnnnnnnnnnnnnnnnnnnnnnnnnnnnnnnnnnnnnnnnnnnnnnnnnnnnnnnnnnnnnnnnnnnnnnnnnnnnnnnnnnnnnnnnnnnnnnnnnnnnnnnnnnnnnnnnnnnnnnnnnnnnnnnnnnnnnnnnnnnnnnnnnnnnnnnnnnnnnnnnnnnnnnnnnnnnnnnnnnnnnnnnnnnnnnnnnnnnnnnnnnnnnnnnnnnnnnnnnnnnnnnnnnnnnnnnnnnnnnnnnnnnnnnnnnnnnnnnnnnnnnnnnnnnnnnnnnnnnnnnnnnnnnnnnnnnnnnnnnnnnnnnnnnnnnnnnnnnnnnnnnnnnnnnnnnnnnnnnnnnnnnnnnnnnnnnnnnnnnnnnnnnnnnnnnnnnnnnnnnnnnnnnnnnnnnnnnnnnnnnnnnnnnnnnnnnnnnnnnnnnnnnnnnnnnnnnnnnnnnnnnnnnnnnnnnnnnnnnnnnnnnnnnnnnnnnnnnnnnnnnnnnnnnnnnnnnnnnnnnnnnnnnnnnnnnnnnnnnnnnnnnnnnnnnnnnnnnnnnnnnnnnnnnnnnnnnnnnnnnnnnnnnnnnnnnnnnnnnnnnnnnnnnnnnnnnnnnnnnnnnnnnnnnnnnnnnnnnnnnnnnnnnnnnnnnnnnnnnnnnnnnnnnnnnnnnnnnnnnnnnnnnnnnnnnnnnnnnnnnnnnnnnnnnnnnnnnnnnnnnnnnnnnnnnnnnnnnnnnnnnnnnnnnnnnnnnnnnnnnnnnnnnnnnnnnnnnnnnnnnnnnnnnnnnnnnnnnnnnnnnnnnnnnnnnnnnnnnnnnnnnnnnnnnnnnnnnnnnnnnnnnnnnnnnnnnnnnnnnnnnnnnnnnnnnnnnnnnnnnnnnnnnnnnnnnnnnnnnnnnnnnnnnnnnnnnnnnnnnnnnnnnnnnnnnnnnnnnnnnnnnnnnnnnnnnnnnnnnnnnnnnnnnnnnnnnnnnnnnnnnnnnnnnnnnnnnnnnnnnnnnnnnnnnnnnnnnnnnnnnnnnnnnnnnnnnnnnnnnnnnnnnnnnnnnnnnnnnnnnnnnnnnnnnnnnnnnnnnnnnnnnnnnnnnnnnnnnnnnnnnnnnnnnnnnnnnnnnnnnnnnnnnnnnnnnnnnnnnnnnnnnnnnnnnnnnnnnnnnnnnnnnnnnnnnnnnnnnnnnnnnnnnnnnnnnnnnnnnnnnnnnnnnnnnnnnnnnnnnnnnnnnnnnnnnnnnnnnnnnnnnnnnnnnnnnnnnnnnnnnnnnnnnnnnnnnnnnnnnnnnnnnnnnnnnnnnnnnnnnnnnnnnnnnnnnnnnnnnnnnnnnnnnnnnnnnnnnnnnnnnnnnnnnnnnnnnnnnnnnnnnnnnnnnnnnnnnnnnnnnnnnnnnnnnnnnnnnnnnnnnnnnnnnnnnnnnnnnnnnnnnnnnnnnnnnnnnnnnnnnnnnnnnnnnnnnnnnnnnnnnnnnnnnnnnnnnnnnnnnnnnnnnnnnnnnnnnnnnnnnnnnnnnnnnnnnnnnnnnnnnnnnnnnnnnnnnnnnnnnnnnnnnnnnnnnnnnnnnnnnnnnnnnnnnnnnnnnnnnnnnnnnnnnnnnnnnnnnnnnnnnnnnnnnnnnnnnnnnnnnnnnnnnnnnnnnnnnnnnnnnnnnnnnnnnnnnnnnnnnnnnnnnnnnnnnnnnnnnnnnnnnnnnnnnnnnnnnnnnnnnnnnnnnnnnnnnnnnnnnnnnnnnnnnnnnnnnnnnnnnnnnnnnnnnnnnnnnnnnnnnnnnnnnnnnnnnnnnnnnnnnnnnnnnnnnnnnnnnnnnnnnnnnnnnnnnnnnnnnnnnnnnnnnnnnnnnnnnnnnnnnnnnnnnnnnnnnnnnnnnnnnnnnnnnnnnnnnnnnnnnnnnnnnnnnnnnnnnnnnnnnnnnnnnnnnnnnnnnnnnnnnnnnnnnnnnnnnnnnnnnnnnnnnnnnnnnnnnnnnnnnnnnnnnnnnnnnnnnnnnnnnnnnnnnnnnnnnnnnnnnnnnnnnnnnnnnnnnnnnnnnnnnnnnnnnnnnnnnnnnnnnnnnnnnnnnnnnnnnnnnnnnnnnnnnnnnnnnnnnnnnnnnnnnnnnnnnnnnnnnnnnnnnnnnnnnnnnnnnnnnnnnnnnnnnnnnnnnnnnnnnnnnnnnnnnnnnnnnnnnnnnnnnnnnnnnnnnnnnnnnnnnnnnnnnnnnnnnnnnnnnnnnnnnnnnnnnnnnnnnnnnnnnnnnnnnnnnnnnnnnnnnnnnnnnnnnnnnnnnnnnnnnnnnnnnnnnnnnnnnnnnnnnnnnnnnnnnnnnnnnnnnnnnnnnnnnnnnnnnnnnnnnnnnnnnnnnnnnnnnnnnnnnnnnnnnnnnnnnnnnnnnnnnnnnnnnnnnnnnnnnnnnnnnnnnnnnnnnnnnnnnnnnnnnnnnnnnnnnnnnnnnnnnnnnnnnnnnnnnnnnnnnnnnnnnnnnnnnnnnnnnnnnnnnnnnnnnnnnnnnnnnnnnnnnnnnnnnnnnnnnnnnnnnnnnnnnnnnnnnnnnnnnnnnnnnnnnnnnnnnnnnnnnnnnnnnnnnnnnnnnnnnnnnnnnnnnnnnnnnnnnnnnnnnnnnnnnnnnnnnnnnnnnnnnnnnnnnnnnnnnnnnnnnnnnnnnnnnnnnnnnnnnnnnnnnnnnnnnnnnnnnnnnnnnnnnnnnnnnnnnnnnnnnnnnnnnnnnnnnnnnnnnnnnnnnnnnnnnnnnnnnnnnnnnnnnnnnnnnnnnnnnnnnnnnnnnnnnnnnnnnnnnnnnnnnnnnnnnnnnnnnnnnnnnnnnnnnnnnnnnnnnnnnnnnnnnnnnnnnnnnnnnnnnnnnnnnnnnnnnnnnnnnnnnnnnnnnnnnnnnnnnnnnnnnnnnnnnnnnnnnnnnnnnnnnnnnnnnnnnnnnnnnnnnnnnnnnnnnnnnnnnnnnnnnnnnnnnnnnnnnnnnnnnnnnnnnnnnnnnnnnnnnnnnnnnnnnnnnnnnnnnnnnnnnnnnnnnnnnnnnnnnnnnnnnnnnnnnnnnnnnnnnnnnnnnnnnnnnnnnnnnnnnnnnnnnnnnnnnnnnnnnnnnnnnnnnnnnnnnnnnnnnnnnnnnnnnnnnnnnnnnnnnnnnnnnnnnnnnnnnnnnnnnnnnnnnnnnnnnnnnnnnnnnnnnnnnnnnnnnnnnnnnnnnnnnnnnnnnnnnnnnnnnnnnnnnnnnnnnnnnnnnnnnnnnnnnnnnnnnnnnnnnnnnnnnnnnnnnnnnnnnnnnnnnnnnnnnnnnnnnnnnnnnnnnnnnnnnnnnnnnnnnnnnnnnnnnnnnnnnnnnnnnnnnnnnnnnnnnnnnnnnnnnnnnnnnnnnnnnnnnnnnnnnnnnnnnnnnnnnnnnnnnnnnnnnnnnnnnnnnnnnnnnnnnnnnnnnnnnnnnnnnnnnnnnnnnnnnnnnnnnnnnnnnnnnnnnnnnnnnnnnnnnnnnnnnnnnnnnnnnnnnnnnnnnnnnnnnnnnnnnnnnnnnnnnnnnnnnnnnnnnnnnnnnnnnnnnnnnnnnnnnnnnnnnnnnnnnnnnnnnnnnnnnnnnnnnnnnnnnnnnnnnnnnnnnnnnnnnnnnnnnnnnnnnnnnnnnnnnnnnnnnnnnnnnnnnnnnnnnnnnnnnnnnnnnnnnnnnnnnnnnnnnnnnnnnnnnnnnnnnnnnnnnnnnnnnnnnnnnnnnnnnnnnnnnnnnnnnnnnnnnnnnnnnnnnnnnnnnnnnnnnnnnnnnnnnnnnnnnnnnnnnnnnnnnnnnnnnnnnnnnnnnnnnnnnnnnnnnnnnnnnnnnnnnnnnnnnnnnnnnnnnnnnnnnnnnnnnnnnnnnnnnnnnnnnnnnnnnnnnnnnnnnnnnnnnnnnnnnnnnnnnnnnnnnnnnnnnnnnnnnnnnnnnnnnnnnnnnnnnnnnnnnnnnnnnnnnnnnnnnnnnnnnnnnnnnnnnnnnnnnnnnnnnnnnnnnnnnnnnnnnnnnnnnnnnnnnnnnnnnnnnnnnnnnnnnnnnnnnnnnnnnnnnnnnnnnnnnnnnnnnnnnnnnnnnnnnnnnnnnnnnnnnnnnnnnnnnnnnnnnnnnnnnnnnnnnnnnnnnnnnnnnnnnnnnnnnnnnnnnnnnnnnnnnnnnnnnnnnnnnnnnnnnnnnnnnnnnnnnnnnnnnnnnnnnnnnnnnnnnnnnnnnnnnnnnnnnnnnnnnnnnnnnnnnnnnnnnnnnnnnnnnnnnnnnnnnnnnnnnnnnnnnnnnnnnnnnnnnnnnnnnnnnnnnnnnnnnnnnnnnnnnnnnnnnnnnnnnnnnnnnnnnnnnnnnnnnnnnnnnnnnnnnnnnnnnnnnnnnnnnnnnnnnnnnnnnnnnnnnnnnnnnnnnnnnnnnnnnnnnnnnnnnnnnnnnnnnnnnnnnnnnnnnnnnnnnnnnnnnnnnnnnnnnnnnnnnnnnnnnnnnnnnnnnnnnnnnnnnnnnnnnnnnnnnnnnnnnnnnnnnnnnnnnnnnnnnnnnnnnnnnnnnnnnnnnnnnnnnnnnnnnnnnnnnnnnnnnnnnnnnnnnnnnnnnnnnnnnnnnnnnnnnnnnnnnnnnnnnnnnnnnnnnnnnnnnnnnnnnnnnnnnnnnnnnnnnnnnnnnnnnnnnnnnnnnnnnnnnnnnnnnnnnnnnnnnnnnnnnnnnnnnnnnnnnnnnnnnnnnnnnnnnnnnnnnnnnnnnnnnnnnnnnnnnnnnnnnnnnnnnnnnnnnnnnnnnnnnnnnnnnnnnnnnnnnnnnnnnnnnnnnnnnnnnnnnnnnnnnnnnnnnnnnnnnnnnnnnnnnnnnnnnnnnnnnnnnnnnnnnnnnnnnnnnnnnnnnnnnnnnnnnnnnnnnnnnnnnnnnnnnnnnnnnnnnnnnnnnnnnnnnnnnnnnnnnnnnnnnnnnnnnnnnnnnnnnnnnnnnnnnnnnnnnnnnnnnnnnnnnnnnnnnnnnnnnnnnnnnnnnnnnnnnnnnnnnnnnnnnnnnnnnnnnnnnnnnnnnnnnnnnnnnnnnnnnnnnnnnnnnnnnnnnnnnnnnnnnnnnnnnnnnnnnnnnnnnnnnnnnnnnnnnnnnnnnnnnnnnnnnnnnnnnnnnnnnnnnnnnnnnnnnnnnnnnnnnnnnnnnnnnnnnnnnnnnnnnnnnnnnnnnnnnnnnnnnnnnnnnnnnnnnnnnnnnnnnnnnnnnnnnnnnnnnnnnnnnnnnnnnnnnnnnnnnnnnnnnnnnnnnnnnnnnnnnnnnnnnnnnnnnnnnnnnnnnnnnnnnnnnnnnnnnnnnnnnnnnnnnnnnnnnnnnnnnnnnnnnnnnnnnnnnnnnnnnnnnnnnnnnnnnnnnnnnnnnnnnnnnnnnnnnnnnnnnnnnnnnnnnnnnnnnnnnnnnnnnnnnnnnnnnnnnnnnnnnnnnnnnnnnnnnnnnnnnnnnnnnnnnnnnnnnnnnnnnnnnnnnnnnnnnnnnnnnnnnnnnnnnnnnnnnnnnnnnnnnnnnnnnnnnnnnnnnnnnnnnnnnnnnnnnnnnnnnnnnnnnnnnnnnnnnnnnnnnnnnnnnnnnnnnnnnnnnnnnnnnnnnnnnnnnnnnnnnnnnnnnnnnnnnnnnnnnnnnnnnnnnnnnnnnnnnnnnnnnnnnnnnnnnnnnnnnnnnnnnnnnnnnnnnnnnnnnnnnnnnnnnnnnnnnnnnnnnnnnnnnnnnnnnnnnnnnnnnnnnnnnnnnnnnnnnnnnnnnnnnnnnnnnnnnnnnnnnnnnnnnnnnnnnnnnnnnnnnnnnnnnnnnnnnnnnnnnnnnnnnnnnnnnnnnnnnnnnnnnnnnnnnnnnnnnnnnnnnnnnnnnnnnnnnnnnnnnnnnnnnnnnnnnnnnnnnnnnnnnnnnnnnnnnnnnnnnnnnnnnnnnnnnnnnnnnnnnnnnnnnnnnnnnnnnnnnnnnnnnnnnnnnnnnnnnnnnnnnnnnnnnnnnnnnnnnnnnnnnnnnnnnnnnnnnnnnnnnnnnnnnnnnnnnnnnnnnnnnnnnnnnnnnnnnnnnnnnnnnnnnnnnnnnnnnnnnnnnnnnnnnnnnnnnnnnnnnnnnnnnnnnnnnnnnnnnnnnnnnnnnnnnnnnnnnnnnnnnnnnnnnnnnnnnnnnnnnnnnnnnnnnnnnnnnnnnnnnnnnnnnnnnnnnnnnnnnnnnnnnnnnnnnnnnnnnnnnnnnnnnnnnnnnnnnnnnnnnnnnnnnnnnnnnnnnnnnnnnnnnnnnnnnnnnnnnnnnnnnnnnnnnnnnnnnnnnnnnnnnnnnnnnnnnnnnnnnnnnnnnnnnnnnnnnnnnnnnnnnnnnnnnnnnnnnnnnnnnnnnnnnnnnnnnnnnnnnnnnnnnnnnnnnnnnnnnnnnnnnnnnnnnnnnnnnnnnnnnnnnnnnnnnnnnnnnnnnnnnnnnnnnnnnnnnnnnnnnnnnnnnnnnnnnnnnnnnnnnnnnnnnnnnnnnnnnnnnnnnnnnnnnnnnnnnnnnnnnnnnnnnnnnnnnnnnnnnnnnnnnnnnnnnnnnnnnnnnnnnnnnnnnnnnnnnnnnnnnnnnnnnnnnnnnnnnnnnnnnnnnnnnnnnnnnnnnnnnnnnnnnnnnnnnnnnnnnnnnnnnnnnnnnnnnnnnnnnnnnnnnnnnnnnnnnnnnnnnnnnnnnnnnnnnnnnnnnnnnnnnnnnnnnnnnnnnnnnnnnnnnnnnnnnnnnnnnnnnnnnnnnnnnnnnnnnnnnnnnnnnnnnnnnnnnnnnnnnnnnnnnnnnnnnnnnnnnnnnnnnnnnnnnnnnnnnnnnnnnnnnnnnnnnnnnnnnnnnnnnnnnnnnnnnnnnnnnnnnnnnnnnnnnnnnnnnnnnnnnnnnnnnnnnnnnnnnnnnnnnnnnnnnnnnnnnnnnnnnnnnnnnnnnnnnnnnnnnnnnnnnnnnnnnnnnnnnnnnnnnnnnnnnnnnnnnnnnnnnnnnnnnnnnnnnnnnnnnnnnnnnnnnnnnnnnnnnnnnnnnnnnnnnnnnnnnnnnnnnnnnnnnnnnnnnnnnnnnnnnnnnnnnnnnnnnnnnnnnnnnnnnnnnnnnnnnnnnnnnnnnnnnnnnnnnnnnnnnnnnnnnnnnnnnnnnnnnnnnnnnnnnnnnnnnnnnnnnnnnnnnnnnnnnnnnnnnnnnnnnnnnnnnnnnnnnnnnnnnnnnnnnnnnnnnnnnnnnnnnnnnnnnnnnnnnnnnnnnnnnnnnnnnnnnnnnnnnnnnnnnnnnnnnnnnnnnnnnnnnnnnnnnnnnnnnnnnnnnnnnnnnnnnnnnnnnnnnnnnnnnnnnnnnnnnnnnnnnnnnnnnnnnnnnnnnnnnnnnnnnnnnnnnnnnnnnnnnnnnnnnnnnnnnnnnnnnnnnnnnnnnnnnnnnnnnnnnnnnnnnnnnnnnnnnnnnnnnnnnnnnnnnnnnnnnnnnnnnnnnnnnnnnnnnnnnnnnnnnnnnnnnnnnnnnnnnnnnnnnnnnnnnnnnnnnnnnnnnnnnnnnnnnnnnnnnnnnnnnnnnnnnnnnnnnnnnnnnnnnnnnnnnnnnnnnnnnnnnnnnnnnnnnnnnnnnnnnnnnnnnnnnnnnnnnnnnnnnnnnnnnnnnnnnnnnnnnnnnnnnnnnnnnnnnnnnnnnnnnnnnnnnnnnnnnnnnnnnnnnnnnnnnnnnnnnnnnnnnnnnnnnnnnnnnnnnnnnnnnnnnnnnnnnnnnnnnnnnnnnnnnnnnnnnnnnnnnnnnnnnnnnnnnnnnnnnnnnnnnnnnnnnnnnnnnnnnnnnnnnnnnnnnnnnnnnnnnnnnnnnnnnnnnnnnnnnnnnnnnnnnnnnnnnnnnnnnnnnnnnnnnnnnnnnnnnnnnnnnnnnnnnnnnnnnnnnnnnnnnnnnnnnnnnnnnnnnnnnnnnnnnnnnnnnnnnnnnnnnnnnnnnnnnnnnnnnnnnnnnnnnnnnnnnnnnnnnnnnnnnnnnnnnnnnnnnnnnnnnnnnnnnnnnnnnnnnnnnnnnnnnnnnnnnnnnnnnnnnnnnnnnnnnnnnnnnnnnnnnnnnnnnnnnnnnnnnnnnnnnnnnnnnnnnnnnnnnnnnnnnnnnnnnnnnnnnnnnnnnnnnnnnnnnnnnnnnnnnnnnnnnnnnnnnnnnnnnnnnnnnnnnnnnnnnnnnnnnnnnnnnnnnnnnnnnnnnnnnnnnnnnnnnnnnnnnnnnnnnnnnnnnnnnnnnnnnnnnnnnnnnnnnnnnnnnnnnnnnnnnnnnnnnnnnnnnnnnnnnnnnnnnnnnnnnnnnnnnnnnnnnnnnnnnnnnnnnnnnnnnnnnnnnnnnnnnnnnnnnnnnnnnnnnnnnnnnnnnnnnnnnnnnnnnnnnnnnnnnnnnnnnnnnnnnnnnnnnnnnnnnnnnnnnnnnnnnnnnnnnnnnnnnnnnnnnnnnnnnnnnnnnnnnnnnnnnnnnnnnnnnnnnnnnnnnnnnnnnnnnnnnnnnnnnnnnnnnnnnnnnnnnnnnnnnnnnnnnnnnnnnnnnnnnnnnnnnnnnnnnnnnnnnnnnnnnnnnnnnnnnnnnnnnnnnnnnnnnnnnnnnnnnnnnnnnnnnnnnnnnnnnnnnnnnnnnnnnnnnnnnnnnnnnnnnnnnnnnnnnnnnnnnnnnnnnnnnnnnnnnnnnnnnnnnnnnnnnnnnnnnnnnnnnnnnnnnnnnnnnnnnnnnnnnnnnnnnnnnnnnnnnnnnnnnnnnnnnnnnnnnnnnnnnnnnnnnnnnnnnnnnnnnnnnnnnnnnnnnnnnnnnnnnnnnnnnnnnnnnnnnnnnnnnnnnnnnnnnnnnnnnnnnnnnnnnnnnnnnnnnnnnnnnnnnnnnnnnnnnnnnnnnnnnnnnnnnnnnnnnnnnnnnnnnnnnnnnnnnnnnnnnnnnnnnnnnnnnnnnnnnnnnnnnnnnnnnnnnnnnnnnnnnnnnnnnnnnnnnnnnnnnnnnnnnnnnnnnnnnnnnnnnnnnnnnnnnnnnnnnnnnnnnnnnnnnnnnnnnnnnnnnnnnnnnnnnnnnnnnnnnnnnnnnnnnnnnnnnnnnnnnnnnnnnnnnnnnnnnnnnnnnnnnnnnnnnnnnnnnnnnnnnnnnnnnnnnnnnnnnnnnnnnnnnnnnnnnnnnnnnnnnnnnnnnnnnnnnnnnnnnnnnnnnnnnnnnnnnnnnnnnnnnnnnnnnnnnnnnnnnnnnnnnnnnnnnnnnnnnnnnnnnnnnnnnnnnnnnnnnnnnnnnnnnnnnnnnnnnnnnnnnnnnnnnnnnnnnnnnnnnnnnnnnnnnnnnnnnnnnnnnnnnnnnnnnnnnnnnnnnnnnnnnnnnnnnnnnnnnnnnnnnnnnnnnnnnnnnnnnnnnnnnnnnnnnnnnnnnnnnnnnnnnnnnnnnnnnnnnnnnnnnnnnnnnnnnnnnnnnnnnnnnnnnnnnnnnnnnnnnnnnnnnnnnnnnnnnnnnnnnnnnnnnnnnnnnnnnnnnnnnnnnnnnnnnnnnnnnnnnnnnnnnnnnnnnnnnnnnnnnnnnnnnnnnnnnnnnnnnnnnnnnnnnnnnnnnnnnnnnnnnnnnnnnnnnnnnnnnnnnnnnnnnnnnnnnnnnnnnnnnnnnnnnnnnnnnnnnnnnnnnnnnnnnnnnnnnnnnnnnnnnnnnnnnnnnnnnnnnnnnnnnnnnnnnnnnnnnnnnnnnnnnnnnnnnnnnnnnnnnnnnnnnnnnnnnnnnnnnnnnnnnnnnnnnnnnnnnnnnnnnnnnnnnnnnnnnnnnnnnnnnnnnnnnnnnnnnnnnnnnnnnnnnnnnnnnnnnnnnnnnnnnnnnnnnnnnnnnnnnnnnnnnnnnnnnnnnnnnnnnnnnnnnnnnnnnnnnnnnnnnnnnnnnnnnnnnnnnnnnnnnnnnnnnnnnnnnnnnnnnnnnnnnnnnnnnnnnnnnnnnnnnnnnnnnnnnnnnnnnnnnnnnnnnnnnnnnnnnnnnnnnnnnnnnnnnnnnnnnnnnnnnnnnnnnnnnnnnnnnnnnnnnnnnnnnnnnnnnnnnnnnnnnnnnnnnnnnnnnnnnnnnnnnnnnnnnnnnnnnnnnnnnnnnnnnnnnnnnnnnnnnnnnnnnnnnnnnnnnnnnnnnnnnnnnnnnnnnnnnnnnnnnnnnnnnnnnnnnnnnnnnnnnnnnnnnnnnnnnnnnnnnnnnnnnnnnnnnnnnnnnnnnnnnnnnnnnnnnnnnnnnnnnnnnnnnnnnnnnnnnnnnnnnnnnnnnnnnnnnnnnnnnnnnnnnnnnnnnnnnnnnnnnnnnnnnnnnnnnnnnnnnnnnnnnnnnnnnnnnnnnnnnnnnnnnnnnnnnnnnnnnnnnnnnnnnnnnnnnnnnnnnnnnnnnnnnnnnnnnnnnnnnnnnnnnnnnnnnnnnnnnnnnnnnnnnnnnnnnnnnnnnnnnnnnnnnnnnnnnnnnnnnnnnnnnnnnnnnnnnnnnnnnnnnnnnnnnnnnnnnnnnnnnnnnnnnnnnnnnnnnnnnnnnnnnnnnnnnnnnnnnnnnnnnnnnnnnnnnnnnnnnnnnnnnnnnnnnnnnnnnnnnnnnnnnnnnnnnnnnnnnnnnnnnnnnnnnnnnnnnnnnnnnnnnnnnnnnnnnnnnnnnnnnnnnnnnnnnnnnnnnnnnnnnnnnnnnnnnnnnnnnnnnnnnnnnnnnnnnnnnnnnnnnnnnnnnnnnnnnnnnnnnnnnnnnnnnnnnnnnnnnnnnnnnnnnnnnnnnnnnnnnnnnnnnnnnnnnnnnnnnnnnnnnnnnnnnnnnnnnnnnnnnnnnnnnnnnnnnnnnnnnnnnnnnnnnnnnnnnnnnnnnnnnnnnnnnnnnnnnnnnnnnnnnnnnnnnnnnnnnnnnnnnnnnnnnnnnnnnnnnnnnnnnnnnnnnnnnnnnnnnnnnnnnnnnnnnnnnnnnnnnnnnnnnnnnnnnnnnnnnnnnnnnnnnnnnnnnnnnnnnnnnnnnnnnnnnnnnnnnnnnnnnnnnnnnnnnnnnnnnnnnnnnnnnnnnnnnnnnnnnnnnnnnnnnnnnnnnnnnnnnnnnnnnnnnnnnnnnnnnnnnnnnnnnnnnnnnnnnnnnnnnnnnnnnnnnnnnnnnnnnnnnnnnnnnnnnnnnnnnnnnnnnnnnnnnnnnnnnnnnnnnnnnnnnnnnnnnnnnnnnnnnnnnnnnnnnnnnnnnnnnnnnnnnnnnnnnnnnnnnnnnnnnnnnnnnnnnnnnnnnnnnnnnnnnnnnnnnnnnnnnnnnnnnnnnnnnnnnnnnnnnnnnnnnnnnnnnnnnnnnnnnnnnnnnnnnnnnnnnnnnnnnnnnnnnnnnnnnnnnnnnnnnnnnnnnnnnnnnnnnnnnnnnnnnnnnnnnnnnnnnnnnnnnnnnnnnnnnnnnnnnnnnnnnnnnnnnnnnnnnnnnnnnnnnnnnnnnnnnnnnnnnnnnnnnnnnnnnnnnnnnnnnnnnnnnnnnnnnnnnnnnnnnnnnnnnnnnnnnnnnnnnnnnnnnnnnnnnnnnnnnnnnnnnnnnnnnnnnnnnnnnnnnnnnnnnnnnnnnnnnnnnnnnnnnnnnnnnnnnnnnnnnnnnnnnnnnnnnnnnnnnnnnnnnnnnnnnnnnnnnnnnnnnnnnnnnnnnnnnnnnnnnnnnnnnnnnnnnnnnnnnnnnnnnnnnnnnnnnnnnnnnnnnnnnnnnnnnnnnnnnnnnnnnnnnnnnnnnnnnnnnnnnnnnnnnnnnnnnnnnnnnnnnnnnnnnnnnnnnnnnnnnnnnnnnnnnnnnnnnnnnnnnnnnnnnnnnnnnnnnnnnnnnnnnnnnnnnnnnnnnnnnnnnnnnnnnnnnnnnnnnnnnnnnnnnnnnnnnnnnnnnnnnnnnnnnnnnnnnnnnnnnnnnnnnnnnnnnnnnnnnnnnnnnnnnnnnnnnnnnnnnnnnnnnnnnnnnnnnnnnnnnnnnnnnnnnnnnnnnnnnnnnnnnnnnnnnnnnnnnnnnnnnnnnnnnnnnnnnnnnnnnnnnnnnnnnnnnnnnnnnnnnnnnnnnnnnnnnnnnnnnnnnnnnnnnnnnnnnnnnnnnnnnnnnnnnnnnnnnnnnnnnnnnnnnnnnnnnnnnnnnnnnnnnnnnnnnnnnnnnnnnnnnnnnnnnnnnnnnnnnnnnnnnnnnnnnnnnnnnnnnnnnnnnnnnnnnnnnnnnnnnnnnnnnnnnnnnnnnnnnnnnnnnnnnnnnnnnnnnnnnnnnnnnnnnnnnnnnnnnnnnnnnnnnnnnnnnnnnnnnnnnnnnnnnnnnnnnnnnnnnnnnnnnnnnnnnnnnnnnnnnnnnnnnnnnnnnnnnnnnnnnnnnnnnnnnnnnnnnnnnnnnnnnnnnnnnnnnnnnnnnnnnnnnnnnnnnnnnnnnnnnnnnnnnnnnnnnnnnnnnnnnnnnnnnnnnnnnnnnnnnnnnnnnnnnnnnnnnnnnnnnnnnnnnnnnnnnnnnnnnnnnnnnnnnnnnnnnnnnnnnnnnnnnnnnnnnnnnnnnnnnnnnnnnnnnnnnnnnnnnnnnnnnnnnnnnnnnnnnnnnnnnnnnnnnnnnnnnnnnnnnnnnnnnnnnnnnnnnnnnnnnnnnnnnnnnnnnnnnnnnnnnnnnnnnnnnnnnnnnnnnnnnnnnnnnnnnnnnnnnnnnnnnnnnnnnnnnnnnnnnnnnnnnnnnnnnnnnnnnnnnnnnnnnnnnnnnnnnnnnnnnnnnnnnnnnnnnnnnnnnnnnnnnnnnnnnnnnnnnnnnnnnnnnnnnnnnnnnnnnnnnnnnnnnnnnnnnnnnnnnnnnnnnnnnnnnnnnnnnnnnnnnnnnnnnnnnnnnnnnnnnnnnnnnnnnnnnnnnnnnnnnnnnnnnnnnnnnnnnnnnnnnnnnnnnnnnnnnnnnnnnnnnnnnnnnnnnnnnnnnnnnnnnnnnnnnnnnnnnnnnnnnnnnnnnnnnnnnnnnnnnnnnnnnnnnnnnnnnnnnnnnnnnnnnnnnnnnnnnnnnnnnnnnnnnnnnnnnnnnnnnnnnnnnnnnnnnnnnnnnnnnnnnnnnnnnnnnnnnnnnnnnnnnnnnnnnnnnnnnnnnnnnnnnnnnnnnnnnnnnnnnnnnnnnnnnnnnnnnnnnnnnnnnnnnnnnnnnnnnnnnnnnnnnnnnnnnnnnnnnnnnnnnnnnnnnnnnnnnnnnnnnnnnnnnnnnnnnnnnnnnnnnnnnnnnnnnnnnnnnnnnnnnnnnnnnnnnnnnnnnnnnnnnnnnnnnnnnnnnnnnnnnnnnnnnnnnnnnnnnnnnnnnnnnnnnnnnnnnnnnnnnnnnnnnnnnnnnnnnnnnnnnnnnnnnnnnnnnnnnnnnnnnnnnnnnnnnnnnnnnnnnnnnnnnnnnnnnnnnnnnnnnnnnnnnnnnnnnnnnnnnnnnnnnnnnnnnnnnnnnnnnnnnnnnnnnnnnnnnnnnnnnnnnnnnnnnnnnnnnnnnnnnnnnnnnnnnnnnnnnnnnnnnnnnnnnnnnnnnnnnnnnnnnnnnnnnnnnnnnnnnnnnnnnnnnnnnnnnnnnnnnnnnnnnnnnnnnnnnnnnnnnnnnnnnnnnnnnnnnnnnnnnnnnnnnnnnnnnnnnnnnnnnnnnnnnnnnnnnnnnnnnnnnnnnnnnnnnnnnnnnnnnnnnnnnnnnnnnnnnnnnnnnnnnnnnnnnnnnnnnnnnnnnnnnnnnnnnnnnnnnnnnnnnnnnnnnnnnnnnnnnnnnnnnnnnnnnnnnnnnnnnnnnnnnnnnnnnnnnnnnnnnnnnnnnnnnnnnnnnnnnnnnnnnnnnnnnnnnnnnnnnnnnnnnnnnnnnnnnnnnnnnnnnnnnnnnnnnnnnnnnnnnnnnnnnnnnnnnnnnnnnnnnnnnnnnnnnnnnnnnnnnnnnnnnnnnnnnnnnnnnnnnnnnnnnnnnnnnnnnnnnnnnnnnnnnnnnnnnnnnnnnnnnnnnnnnnnnnnnnnnnnnnnnnnnnnnnnnnnnnnnnnnnnnnnnnnnnnnnnnnnnnnnnnnnnnnnnnnnnnnnnnnnnnnnnnnnnnnnnnnnnnnnnnnnnnnnnnnnnnnnnnnnnnnnnnnnnnnnnnnnnnnnnnnnnnnnnnnnnnnnnnnnnnnnnnnnnnnnnnnnnnnnnnnnnnnnnnnnnnnnnnnnnnnnnnnnnnnnnnnnnnnnnnnnnnnnnnnnnnnnnnnnnnnnnnnnnnnnnnnnnnnnnnnnnnnnnnnnnnnnnnnnnnnnnnnnnnnnnnnnnnnnnnnnnnnnnnnnnnnnnnnnnnnnnnnnnnnnnnnnnnnnnnnnnnnnnnnnnnnnnnnnnnnnnnnnnnnnnnnnnnnnnnnnnnnnnnnnnnnnnnnnnnnnnnnnnnnnnnnnnnnnnnnnnnnnnnnnnnnnnnnnnnnnnnnnnnnnnnnnnnnnnnnnnnnnnnnnnnnnnnnnnnnnnnnnnnnnnnnnnnnnnnnnnnnnnnnnnnnnnnnnnnnnnnnnnnnnnnnnnnnnnnnnnnnnnnnnnnnnnnnnnnnnnnnnnnnnnnnnnnnnnnnnnnnnnnnnnnnnnnnnnnnnnnnnnnnnnnnnnnnnnnnnnnnnnnnnnnnnnnnnnnnnnnnnnnnnnnnnnnnnnnnnnnnnnnnnnnnnnnnnnnnnnnnnnnnnnnnnnnnnnnnnnnnnnnnnnnnnnnnnnnnnnnnnnnnnnnnnnnnnnnnnnnnnnnnnnnnnnnnnnnnnnnnnnnnnnnnnnnnnnnnnnnnnnnnnnnnnnnnnnnnnnnnnnnnnnnnnnnnnnnnnnnnnnnnnnnnnnnnnnnnnnnnnnnnnnnnnnnnnnnnnnnnnnnnnnnnnnnnnnnnnnnnnnnnnnnnnnnnnnnnnnnnnnnnnnnnnnnnnnnnnnnnnnnnnnnnnnnnnnnnnnnnnnnnnnnnnnnnnnnnnnnnnnnnnnnnnnnnnnnnnnnnnnnnnnnnnnnnnnnnnnnnnnnnnnnnnnnnnnnnnnnnnnnnnnnnnnnnnnnnnnnnnnnnnnnnnnnnnnnnnnnnnnnnnnnnnnnnnnnnnnnnnnnnnnnnnnnnnnnnnnnnnnnnnnnnnnnnnnnnnnnnnnnnnnnnnnnnnnnnnnnnnnnnnnnnnnnnnnnnnnnnnnnnnnnnnnnnnnnnnnnnnnnnnnnnnnnnnnnnnnnnnnnnnnnnnnnnnnnnnnnnnnnnnnnnnnnnnnnnnnnnnnnnnnnnnnnnnnnnnnnnnnnnnnnnnnnnnnnnnnnnnnnnnnnnnnnnnnnnnnnnnnnnnnnnnnnnnnnnnnnnnnnnnnnnnnnnnnnnnnnnnnnnnnnnnnnnnnnnnnnnnnnnnnnnnnnnnnnnnnnnnnnnnnnnnnnnnnnnnnnnnnnnnnnnnnnnnnnnnnnnnnnnnnnnnnnnnnnnnnnnnnnnnnnnnnnnnnnnnnnnnnnnnnnnnnnnnnnnnnnnnnnnnnnnnnnnnnnnnnnnnnnnnnnnnnnnnnnnnnnnnnnnnnnnnnnnnnnnnnnnnnnnnnnnnnnnnnnnnnnnnnnnnnnnnnnnnnnnnnnnnnnnnnnnnnnnnnnnnnnnnnnnnnnnnnnnnnnnnnnnnnnnnnnnnnnnnnnnnnnnnnnnnnnnnnnnnnnnnnnnnnnnnnnnnnnnnnnnnnnnnnnnnnnnnnnnnnnnnnnnnnnnnnnnnnnnnnnnnnnnnnnnnnnnnnnnnnnnnnnnnnnnnnnnnnnnnnnnnnnnnnnnnnnnnnnnnnnnnnnnnnnnnnnnnnnnnnnnnnnnnnnnnnnnnnnnnnnnnnnnnnnnnnnnnnnnnnnnnnnnnnnnnnnnnnnnnnnnnnnnnnnnnnnnnnnnnnnnnnnnnnnnnnnnnnnnnnnnnnnnnnnnnnnnnnnnnnnnnnnnnnnnnnnnnnnnnnnnnnnnnnnnnnnnnnnnnnnnnnnnnnnnnnnnnnnnnnnnnnnnnnnnnnnnnnnnnnnnnnnnnnnnnnnnnnnnnnnnnnnnnnnnnnnnnnnnnnnnnnnnnnnnnnnnnnnnnnnnnnnnnnnnnnnnnnnnnnnnnnnnnnnnnnnnnnnnnnnnnnnnnnnnnnnnnnnnnnnnnnnnnnnnnnnnnnnnnnnnnnnnnnnnnnnnnnnnnnnnnnnnnnnnnnnnnnnnnnnnnnnnnnnnnnnnnnnnnnnnnnnnnnnnnnnnnnnnnnnnnnnnnnnnnnnnnnnnnnnnnnnnnnnnnnnnnnnnnnnnnnnnnnnnnnnnnnnnnnnnnnnnnnnnnnnnnnnnnnnnnnnnnnnnnnnnnnnnnnnnnnnnnnnnnnnnnnnnnnnnnnnnnnnnnnnnnnnnnnnnnnnnnnnnnnnnnnnnnnnnnnnnnnnnnnnnnnnnnnnnnnnnnnnnnnnnnnnnnnnnnnnnnnnnnnnnnnnnnnnnnnnnnnnnnnnnnnnnnnnnnnnnnnnnnnnnnnnnnnnnnnnnnnnnnnnnnnnnnnnnnnnnnnnnnnnnnnnnnnnnnnnnnnnnnnnnnnnnnnnnnnnnnnnnnnnnnnnnnnnnnnnnnnnnnnnnnnnnnnnnnnnnnnnnnnnnnnnnnnnnnnnnnnnnnnnnnnnnnnnnnnnnnnnnnnnnnnnnnnnnnnnnnnnnnnnnnnnnnnnnnnnnnnnnnnnnnnnnnnnnnnnnnnnnnnnnnnnnnnnnnnnnnnnnnnnnnnnnnnnnnnnnnnnnnnnnnnnnnnnnnnnnnnnnnnnnnnnnnnnnnnnnnnnnnnnnnnnnnnnnnnnnnnnnnnnnnnnnnnnnnnnnnnnnnnnnnnnnnnnnnnnnnnnnnnnnnnnnnnnnnnnnnnnnnnnnnnnnnnnnnnnnnnnnnnnnnnnnnnnnnnnnnnnnnnnnnnnnnnnnnnnnnnnnnnnnnnnnnnnnnnnnnnnnnnnnnnnnnnnnnnnnnnnnnnnnnnnnnnnnnnnnnnnnnnnnnnnnnnnnnnnnnnnnnnnnnnnnnnnnnnnnnnnnnnnnnnnnnnnnnnnnnnnnnnnnnnnnnnnnnnnnnnnnnnnnnnnnnnnnnnnnnnnnnnnnnnnnnnnnnnnnnnnnnnnnnnnnnnnnnnnnnnnnnnnnnnnnnnnnnnnnnnnnnnnnnnnnnnnnnnnnnnnnnnnnnnnnnnnnnnnnnnnnnnnnnnnnnnnnnnnnnnnnnnnnnnnnnnnnnnnnnnnnnnnnnnnnnnnnnnnnnnnnnnnnnnnnnnnnnnnnnnnnnnnnnnnnnnnnnnnnnnnnnnnnnnnnnnnnnnnnnnnnnnnnnnnnnnnnnnnnnnnnnnnnnnnnnnnnnnnnnnnnnnnnnnnnnnnnnnnnnnnnnnnnnnnnnnnnnnnnnnnnnnnnnnnnnnnnnnnnnnnnnnnnnnnnnnnnnnnnnnnnnnnnnnnnnnnnnnnnnnnnnnnnnnnnnnnnnnnnnnnnnnnnnnnnnnnnnnnnnnnnnnnnnnnnnnnnnnnnnnnnnnnnnnnnnnnnnnnnnnnnnnnnnnnnnnnnnnnnnnnnnnnnnnnnnnnnnnnnnnnnnnnnnnnnnnnnnnnnnnnnnnnnnnnnnnnnnnnnnnnnnnnnnnnnnnnnnnnnnnnnnnnnnnnnnnnnnnnnnnnnnnnnnnnnnnnnnnnnnnnnnnnnnnnnnnnnnnnnnnnnnnnnnnnnnnnnnnnnnnnnnnnnnnnnnnnnnnnnnnnnnnnnnnnnnnnnnnnnnnnnnnnnnnnnnnnnnnnnnnnnnnnnnnnnnnnnnnnnnnnnnnnnnnnnnnnnnnnnnnnnnnnnnnnnnnnnnnnnnnnnnnnnnnnnnnnnnnnnnnnnnnnnnnnnnnnnnnnnnnnnnnnnnnnnnnnnnnnnnnnnnnnnnnnnnnnnnnnnnnnnnnnnnnnnnnnnnnnnnnnnnnnnnnnnnnnnnnnnnnnnnnnnnnnnnnnnnnnnnnnnnnnnnnnnnnnnnnnnnnnnnnnnnnnnnnnnnnnnnnnnnnnnnnnnnnnnnnnnnnnnnnnnnnnnnnnnnnnnnnnnnnnnnnnnnnnnnnnnnnnnnnnnnnnnnnnnnnnnnnnnnnnnnnnnnnnnnnnnnnnnnnnnnnnnnnnnnnnnnnnnnnnnnnnnnnnnnnnnnnnnnnnnnnnnnnnnnnnnnnnnnnnnnnnnnnnnnnnnnnnnnnnnnnnnnnnnnnnnnnnnnnnnnnnnnnnnnnnnnnnnnnnnnnnnnnnnnnnnnnnnnnnnnnnnnnnnnnnnnnnnnnnnnnnnnnnnnnnnnnnnnnnnnnnnnnnnnnnnnnnnnnnnnnnnnnnnnnnnnnnnnnnnnnnnnnnnnnnnnnnnnnnnnnnnnnnnnnnnnnnnnnnnnnnnnnnnnnnnnnnnnnnnnnnnnnnnnnnnnnnnnnnnnnnnnnnnnnnnnnnnnnnnnnnnnnnnnnnnnnnnnnnnnnnnnnnnnnnnnnnnnnnnnnnnnnnnnnnnnnnnnnnnnnnnnnnnnnnnnnnnnnnnnnnnnnnnnnnnnnnnnnnnnnnnnnnnnnnnnnnnnnnnnnnnnnnnnnnnnnnnnnnnnnnnnnnnnnnnnnnnnnnnnnnnnnnnnnnnnnnnnnnnnnnnnnnnnnnnnnnnnnnnnnnnnnnnnnnnnnnnnnnnnnnnnnnnnnnnnnnnnnnnnnnnnnnnnnnnnnnnnnnnnnnnnnnnnnnnnnnnnnnnnnnnnnnnnnnnnnnnnnnnnnnnnnnnnnnnnnnnnnnnnnnnnnnnnnnnnnnnnnnnnnnnnnnnnnnnnnnnnnnnnnnnnnnnnnnnnnnnnnnnnnnnnnnnnnnnnnnnnnnnnnnnnnnnnnnnnnnnnnnnnnnnnnnnnnnnnnnnnnnnnnnnnnnnnnnnnnnnnnnnnnnnnnnnnnnnnnnnnnnnnnnnnnnnnnnnnnnnnnnnnnnnnnnnnnnnnnnnnnnnnnnnnnnnnnnnnnnnnnnnnnnnnnnnnnnnnnnnnnnnnnnnnnnnnnnnnnnnnnnnnnnnnnnnnnnnnnnnnnnnnnnnnnnnnnnnnnnnnnnnnnnnnnnnnnnnnnnnnnnnnnnnnnnnnnnnnnnnnnnnnnnnnnnnnnnnnnnnnnnnnnnnnnnnnnnnnnnnnnnnnnnnnnnnnnnnnnnnnnnnnnnnnnnnnnnnnnnnnnnnnnnnnnnnnnnnnnnnnnnnnnnnnnnnnnnnnnnnnnnnnnnnnnnnnnnnnnnnnnnnnnnnnnnnnnnnnnnnnnnnnnnnnnnnnnnnnnnnnnnnnnnnnnnnnnnnnnnnnnnnnnnnnnnnnnnnnnnnnnnnnnnnnnnnnnnnnnnnnnnnnnnnnnnnnnnnnnnnnnnnnnnnnnnnnnnnnnnnnnnnnnnnnnnnnnnnnnnnnnnnnnnnnnnnnnnnnnnnnnnnnnnnnnnnnnnnnnnnnnnnnnnnnnnnnnnnnnnnnnnnnnnnnnnnnnnnnnnnnnnnnnnnnnnnnnnnnnnnnnnnnnnnnnnnnnnnnnnnnnnnnnnnnnnnnnnnnnnnnnnnnnnnnnnnnnnnnnnnnnnnnnnnnnnnnnnnnnnnnnnnnnnnnnnnnnnnnnnnnnnnnnnnnnnnnnnnnnnnnnnnnnnnnnnnnnnnnnnnnnnnnnnnnnnnnnnnnnnnnnnnnnnnnnnnnnnnnnnnnnnnnnnnnnnnnnnnnnnnnnnnnnnnnnnnnnnnnnnnnnnnnnnnnnnnnnnnnnnnnnnnnnnnnnnnnnnnnnnnnnnnnnnnnnnnnnnnnnnnnnnnnnnnnnnnnnnnnnnnnnnnnnnnnnnnnnnnnnnnnnnnnnnnnnnnnnnnnnnnnnnnnnnnnnnnnnnnnnnnnnnnnnnnnnnnnnnnnnnnnnnnnnnnnnnnnnnnnnnnnnnnnnnnnnnnnnnnnnnnnnnnnnnnnnnnnnnnnnnnnnnnnnnnnnnnnnnnnnnnnnnnnnnnnnnnnnnnnnnnnnnnnnnnnnnnnnnnnnnnnnnnnnnnnnnnnnnnnnnnnnnnnnnnnnnnnnnnnnnnnnnnnnnnnnnnnnnnnnnnnnnnnnnnnnnnnnnnnnnnnnnnnnnnnnnnnnnnnnnnnnnnnnnnnnnnnnnnnnnnnnnnnnnnnnnnnnnnnnnnnnnnnnnnnnnnnnnnnnnnnnnnnnnnnnnnnnnnnnnnnnnnnnnnnnnnnnnnnnnnnnnnnnnnnnnnnnnnnnnnnnnnnnnnnnnnnnnnnnnnnnnnnnnnnnnnnnnnnnnnnnnnnnnnnnnnnnnnnnnnnnnnnnnnnnnnnnnnnnnnnnnnnnnnnnnnnnnnnnnnnnnnnnnnnnnnnnnnnnnnnnnnnnnnnnnnnnnnnnnnnnnnnnnnnnnnnnnnnnnnnnnnnnnnnnnnnnnnnnnnnnnnnnnnnnnnnnnnnnnnnnnnnnnnnnnnnnnnnnnnnnnnnnnnnnnnnnnnnnnnnnnnnnnnnnnnnnnnnnnnnnnnnnnnnnnnnnnnnnnnnnnnnnnnnnnnnnnnnnnnnnnnnnnnnnnnnnnnnnnnnnnnnnnnnnnnnnnnnnnnnnnnnnnnnnnnnnnnnnnnnnnnnnnnnnnnnnnnnnnnnnnnnnnnnnnnnnnnnnnnnnnnnnnnnnnnnnnnnnnnnnnnnnnnnnnnnnnnnnnnnnnnnnnnnnnnnnnnnnnnnnnnnnnnnnnnnnnnnnnnnnnnnnnnnnnnnnnnnnnnnnnnnnnnnnnnnnnnnnnnnnnnnnnnnnnnnnnnnnnnnnnnnnnnnnnnnnnnnnnnnnnnnnnnnnnnnnnnnnnnnnnnnnnnnnnnnnnnnnnnnnnnnnnnnnnnnnnnnnnnnnnnnnnnnnnnnnnnnnnnnnnnnnnnnnnnnnnnnnnnnnnnnnnnnnnnnnnnnnnnnnnnnnnnnnnnnnnnnnnnnnnnnnnnnnnnnnnnnnnnnnnnnnnnnnnnnnnnnnnnnnnnnnnnnnnnnnnnnnnnnnnnnnnnnnnnnnnnnnnnnnnnnnnnnnnnnnnnnnnnnnnnnnnnnnnnnnnnnnnnnnnnnnnnnnnnnnnnnnnnnnnnnnnnnnnnnnnnnnnnnnnnnnnnnnnnnnnnnnnnnnnnnnnnnnnnnnnnnnnnnnnnnnnnnnnnnnnnnnnnnnnnnnnnnnnnnnnnnnnnnnnnnnnnnnnnnnnnnnnnnnnnnnnnnnnnnnnnnnnnnnnnnnnnnnnnnnnnnnnnnnnnnnnnnnnnnnnnnnnnnnnnnnnnnnnnnnnnnnnnnnnnnnnnnnnnnnnnnnnnnnnnnnnnnnnnnnnnnnnnnnnnnnnnnnnnnnnnnnnnnnnnnnnnnnnnnnnnnnnnnnnnnnnnnnnnnnnnnnnnnnnnnnnnnnnnnnnnnnnnnnnnnnnnnnnnnnnnnnnnnnnnnnnnnnnnnnnnnnnnnnnnnnnnnnnnnnnnnnnnnnnnnnnnnnnnnnnnnnnnnnnnnnnnnnnnnnnnnnnnnnnnnnnnnnnnnnnnnnnnnnnnnnnnnnnnnnnnnnnnnnnnnnnnnnnnnnnnnnnnnnnnnnnnnnnnnnnnnnnnnnnnnnnnnnnnnnnnnnnnnnnnnnnnnnnnnnnnnnnnnnnnnnnnnnnnnnnnnnnnnnnnnnnnnnnnnnnnnnnnnnnnnnnnnnnnnnnnnnnnnnnnnnnnnnnnnnnnnnnnnnnnnnnnnnnnnnnnnnnnnnnnnnnnnnnnnnnnnnnnnnnnnnnnnnnnnnnnnnnnnnnnnnnnnnnnnnnnnnnnnnnnnnnnnnnnnnnnnnnnnnnnnnnnnnnnnnnnnnnnnnnnnnnnnnnnnnnnnnnnnnnnnnnnnnnnnnnnnnnnnnnnnnnnnnnnnnnnnnnnnnnnnnnnnnnnnnnnnnnnnnnnnnnnnnnnnnnnnnnnnnnnnnnnnnnnnnnnnnnnnnnnnnnnnnnnnnnnnnnnnnnnnnnnnnnnnnnnnnnnnnnnnnnnnnnnnnnnnnnnnnnnnnnnnnnnnnnnnnnnnnnnnnnnnnnnnnnnnnnnnnnnnnnnnnnnnnnnnnnnnnnnnnnnnnnnnnnnnnnnnnnnnnnnnnnnnnnnnnnnnnnnnnnnnnnnnnnnnnnnnnnnnnnnnnnnnnnnnnnnnnnnnnnnnnnnnnnnnnnnnnnnnnnnnnnnnnnnnnnnnnnnnnnnnnnnnnnnnnnnnnnnnnnnnnnnnnnnnnnnnnnnnnnnnnnnnnnnnnnnnnnnnnnnnnnnnnnnnnnnnnnnnnnnnnnnnnnnnnnnnnnnnnnnnnnnnnnnnnnnnnnnnnnnnnnnnnnnnnnnnnnnnnnnnnnnnnnnnnnnnnnnnnnnnnnnnnnnnnnnnnnnnnnnnnnnnnnnnnnnnnnnnnnnnnnnnnnnnnnnnnnnnnnnnnnnnnnnnnnnnnnnnnnnnnnnnnnnnnnnnnnnnnnnnnnnnnnnnnnnnnnnnnnnnnnnnnnnnnnnnnnnnnnnnnnnnnnnnnnnnnnnnnnnnnnnnnnnnnnnnnnnnnnnnnnnnnnnnnnnnnnnnnnnnnnnnnnnnnnnnnnnnnnnnnnnnnnnnnnnnnnnnnnnnnnnnnnnnnnnnnnnnnnnnnnnnnnnnnnnnnnnnnnnnnnnnnnnnnnnnnnnnnnnnnnnnnnnnnnnnnnnnnnnnnnnnnnnnnnnnnnnnnnnnnnnnnnnnnnnnnnnnnnnnnnnnnnnnnnnnnnnnnnnnnnnnnnnnnnnnnnnnnnnnnnnnnnnnnnnnnnnnnnnnnnnnnnnnnnnnnnnnnnnnnnnnnnnnnnnnnnnnnnnnnnnnnnnnnnnnnnnnnnnnnnnnnnnnnnnnnnnnnnnnnnnnnnnnnnnnnnnnnnnnnnnnnnnnnnnnnnnnnnnnnnnnnnnnnnnnnnnnnnnnnnnnnnnnnnnnnnnnnnnnnnnnnnnnnnnnnnnnnnnnnnnnnnnnnnnnnnnnnnnnnnnnnnnnnnnnnnnnnnnnnnnnnnnnnnnnnnnnnnnnnnnnnnnnnnnnnnnnnnnnnnnnnnnnnnnnnnnnnnnnnnnnnnnnnnnnnnnnnnnnnnnnnnnnnnnnnnnnnnnnnnnnnnnnnnnnnnnnnnnnnnnnnnnnnnnnnnnnnnnnnnnnnnnnnnnnnnnnnnnnnnnnnnnnnnnnnnnnnnnnnnnnnnnnnnnnnnnnnnnnnnnnnnnnnnnnnnnnnnnnnnnnnnnnnnnnnnnnnnnnnnnnnnnnnnnnnnnnnnnnnnnnnnnnnnnnnnnnnnnnnnnnnnnnnnnnnnnnnnnnnnnnnnnnnnnnnnnnnnnnnnnnnnnnnnnnnnnnnnnnnnnnnnnnnnnnnnnnnnnnnnnnnnnnnnnnnnnnnnnnnnnnnnnnnnnnnnnnnnnnnnnnnnnnnnnnnnnnnnnnnnnnnnnnnnnnnnnnnnnnnnnnnnnnnnnnnnnnnnnnnnnnnnnnnnnnnnnnnnnnnnnnnnnnnnnnnnnnnnnnnnnnnnnnnnnnnnnnnnnnnnnnnnnnnnnnnnnnnnnnnnnnnnnnnnnnnnnnnnnnnnnnnnnnnnnnnnnnnnnnnnnnnnnnnnnnnnnnnnnnnnnnnnnnnnnnnnnnnnnnnnnnnnnnnnnnnnnnnnnnnnnnnnnnnnnnnnnnnnnnnnnnnnnnnnnnnnnnnnnnnnnnnnnnnnnnnnnnnnnnnnnnnnnnnnnnnnnnnnnnnnnnnnnnnnnnnnnnnnnnnnnnnnnnnnnnnnnnnnnnnnnnnnnnnnnnnnnnnnnnnnnnnnnnnnnnnnnnnnnnnnnnnnnnnnnnnnnnnnnnnnnnnnnnnnnnnnnnnnnnnnnnnnnnnnnnnnnnnnnnnnnnnnnnnnnnnnnnnnnnnnnnnnnnnnnnnnnnnnnnnnnnnnnnnnnnnnnnnnnnnnnnnnnnnnnnnnnnnnnnnnnnnnnnnnnnnnnnnnnnnnnnnnnnnnnnnnnnnnnnnnnnnnnnnnnnnnnnnnnnnnnnnnnnnnnnnnnnnnnnnnnnnnnnnnnnnnnnnnnnnnnnnnnnnnnnnnnnnnnnnnnnnnnnnnnnnnnnnnnnnnnnnnnnnnnnnnnnnnnnnnnnnnnnnnnnnnnnnnnnnnnnnnnnnnnnnnnnnnnnnnnnnnnnnnnnnnnnnnnnnnnnnnnnnnnnnnnnnnnnnnnnnnnnnnnnnnnnnnnnnnnnnnnnnnnnnnnnnnnnnnnnnnnnnnnnnnnnnnnnnnnnnnnnnnnnnnnnnnnnnnnnnnnnnnnnnnnnnnnnnnnnnnnnnnnnnnnnnnnnnnnnnnnnnnnnnnnnnnnnnnnnnnnnnnnnnnnnnnnnnnnnnnnnnnnnnnnnnnnnnnnnnnnnnnnnnnnnnnnnnnnnnnnnnnnnnnnnnnnnnnnnnnnnnnnnnnnnnnnnnnnnnnnnnnnnnnnnnnnnnnnnnnnnnnnnnnnnnnnnnnnnnnnnnnnnnnnnnnnnnnnnnnnnnnnnnnnnnnnnnnnnnnnnnnnnnnnnnnnnnnnnnnnnnnnnnnnnnnnnnnnnnnnnnnnnnnnnnnnnnnnnnnnnnnnnnnnnnnnnnnnnnnnnnnnnnnnnnnnnnnnnnnnnnnnnnnnnnnnnnnnnnnnnnnnnnnnnnnnnnnnnnnnnnnnnnnnnnnnnnnnnnnnnnnnnnnnnnnnnnnnnnnnnnnnnnnnnnnnnnnnnnnnnnnnnnnnnnnnnnnnnnnnnnnnnnnnnnnnnnnnnnnnnnnnnnnnnnnnnnnnnnnnnnnnnnnnnnnnnnnnnnnnnnnnnnnnnnnnnnnnnnnnnnnnnnnnnnnnnnnnnnnnnnnnnnnnnnnnnnnnnnnnnnnnnnnnnnnnnnnnnnnnnnnnnnnnnnnnnnnnnnnnnnnnnnnnnnnnnnnnnnnnnnnnnnnnnnnnnnnnnnnnnnnnnnnnnnnnnnnnnnnnnnnnnnnnnnnnnnnnnnnnnnnnnnnnnnnnnnnnnnnnnnnnnnnnnnnnnnnnnnnnnnnnnnnnnnnnnnnnnnnnnnnnnnnnnnnnnnnnnnnnnnnnnnnnnnnnnnnnnnnnnnnnnnnnnnnnnnnnnnnnnnnnnnnnnnnnnnnnnnnnnnnnnnnnnnnnnnnnnnnnnnnnnnnnnnnnnnnnnnnnnnnnnnnnnnnnnnnnnnnnnnnnnnnnnnnnnnnnnnnnnnnnnnnnnnnnnnnnnnnnnnnnnnnnnnnnnnnnnnnnnnnnnnnnnnnnnnnnnnnnnnnnnnnnnnnnnnnnnnnnnnnnnnnnnnnnnnnnnnnnnnnnnnnnnnnnnnnnnnnnnnnnnnnnnnnnnnnnnnnnnnnnnnnnnnnnnnnnnnnnnnnnnnnnnnnnnnnnnnnnnnnnnnnnnnnnnnnnnnnnnnnnnnnnnnnnnnnnnnnnnnnnnnnnnnnnnnnnnnnnnnnnnnnnnnnnnnnnnnnnnnnnnnnnnnnnnnnnnnnnnnnnnnnnnnnnnnnnnnnnnnnnnnnnnnnnnnnnnnnnnnnnnnnnnnnnnnnnnnnnnnnnnnnnnnnnnnnnnnnnnnnnnnnnnnnnnnnnnnnnnnnnnnnnnnnnnnnnnnnnnnnnnnnnnnnnnnnnnnnnnnnnnnnnnnnnnnnnnnnnnnnnnnnnnnnnnnnnnnnnnnnnnnnnnnnnnnnnnnnnnnnnnnnnnnnnnnnnnnnnnnnnnnnnnnnnnnnnnnnnnnnnnnnnnnnnnnnnnnnnnnnnnnnnnnnnnnnnnnnnnnnnnnnnnnnnnnnnnnnnnnnnnnnnnnnnnnnnnnnnnnnnnnnnnnnnnnnnnnnnnnnnnnnnnnnnnnnnnnnnnnnnnnnnnnnnnnnnnnnnnnnnnnnnnnnnnnnnnnnnnnnnnnnnnnnnnnnnnnnnnnnnnnnnnnnnnnnnnnnnnnnnnnnnnnnnnnnnnnnnnnnnnnnnnnnnnnnnnnnnnnnnnnnnnnnnnnnnnnnnnnnnnnnnnnnnnnnnnnnnnnnnnnnnnnnnnnnnnnnnnnnnnnnnnnnnnnnnnnnnnnnnnnnnnnnnnnnnnnnnnnnnnnnnnnnnnnnnnnnnnnnnnnnnnnnnnnnnnnnnnnnnnnnnnnnnnnnnnnnnnnnnnnnnnnnnnnnnnnnnnnnnnnnnnnnnnnnnnnnnnnnnnnnnnnnnnnnnnnnnnnnnnnnnnnnnnnnnnnnnnnnnnnnnnnnnnnnnnnnnnnnnnnnnnnnnnnnnnnnnnnnnnnnnnnnnnnnnnnnnnnnnnnnnnnnnnnnnnnnnnnnnnnnnnnnnnnnnnnnnnnnnnnnnnnnnnnnnnnnnnnnnnnnnnnnnnnnnnnnnnnnnnnnnnnnnnnnnnnnnnnnnnnnnnnnnnnnnnnnnnnnnnnnnnnnnnnnnnnnnnnnnnnnnnnnnnnnnnnnnnnnnnnnnnnnnnnnnnnnnnnnnnnnnnnnnnnnnnnnnnnnnnnnnnnnnnnnnnnnnnnnnnnnnnnnnnnnnnnnnnnnnnnnnnnnnnnnnnnnnnnnnnnnnnnnnnnnnnnnnnnnnnnnnnnnnnnnnnnnnnnnnnnnnnnnnnnnnnnnnnnnnnnnnnnnnnnnnnnnnnnnnnnnnnnnnnnnnnnnnnnnnnnnnnnnnnnnnnnnnnnnnnnnnnnnnnnnnnnnnnnnnnnnnnnnnnnnnnnnnnnnnnnnnnnnnnnnnnnnnnnnnnnnnnnnnnnnnnnnnnnnnnnnnnnnnnnnnnnnnnnnnnnnnnnnnnnnnnnnnnnnnnnnnnnnnnnnnnnnnnnnnnnnnnnnnnnnnnnnnnnnnnnnnnnnnnnnnnnnnnnnnnnnnnnnnnnnnnnnnnnnnnnnnnnnnnnnnnnnnnnnnnnnnnnnnnnnnnnnnnnnnnnnnnnnnnnnnnnnnnnnnnnnnnnnnnnnnnnnnnnnnnnnnnnnnnnnnnnnnnnnnnnnnnnnnnnnnnnnnnnnnnnnnnnnnnnnnnnnnnnnnnnnnnnnnnnnnnnnnnnnnnnnnnnnnnnnnnnnnnnnnnnnnnnnnnnnnnnnnnnnnnnnnnnnnnnnnnnnnnnnnnnnnnnnnnnnnnnnnnnnnnnnnnnnnnnnnnnnnnnnnnnnnnnnnnnnnnnnnnnnnnnnnnnnnnnnnnnnnnnnnnnnnnnnnnnnnnnnnnnnnnnnnnnnnnnnnnnnnnnnnnnnnnnnnnnnnnnnnnnnnnnnnnnnnnnnnnnnnnnnnnnnnnnnnnnnnnnnnnnnnnnnnnnnnnnnnnnnnnnnnnnnnnnnnnnnnnnnnnnnnnnnnnnnnnnnnnnnnnnnnnnnnnnnnnnnnnnnnnnnnnnnnnnnnnnnnnnnnnnnnnnnnnnnnnnnnnnnnnnnnnnnnnnnnnnnnnnnnnnnnnnnnnnnnnnnnnnnnnnnnnnnnnnnnnnnnnnnnnnnnnnnnnnnnnnnnnnnnnnnnnnnnnnnnnnnnnnnnnnnnnnnnnnnnnnnnnnnnnnnnnnnnnnnnnnnnnnnnnnnnnnnnnnnnnnnnnnnnnnnnnnnnnnnnnnnnnnnnnnnnnnnnnnnnnnnnnnnnnnnnnnnnnnnnnnnnnnnnnnnnnnnnnnnnnnnnnnnnnnnnnnnnnnnnnnnnnnnnnnnnnnnnnnnnnnnnnnnnnnnnnnnnnnnnnnnnnnnnnnnnnnnnnnnnnnnnnnnnnnnnnnnnnnnnnnnnnnnnnnnnnnnnnnnnnnnnnnnnnnnnnnnnnnnnnnnnnnnnnnnnnnnnnnnnnnnnnnnnnnnnnnnnnnnnnnnnnnnnnnnnnnnnnnnnnnnnnnnnnnnnnnnnnnnnnnnnnnnnnnnnnnnnnnnnnnnnnnnnnnnnnnnnnnnnnnnnnnnnnnnnnnnnnnnnnnnnnnnnnnnnnnnnnnnnnnnnnnnnnnnnnnnnnnnnnnnnnnnnnnnnnnnnnnnnnnnnnnnnnnnnnnnnnnnnnnnnnnnnnnnnnnnnnnnnnnnnnnnnnnnnnnnnnnnnnnnnnnnnnnnnnnnnnnnnnnnnnnnnnnnnnnnnnnnnnnnnnnnnnnnnnnnnnnnnnnnnnnnnnnnnnnnnnnnnnnnnnnnnnnnnnnnnnnnnnnnnnnnnnnnnnnnnnnnnnnnnnnnnnnnnnnnnnnnnnnnnnnnnnnnnnnnnnnnnnnnnnnnnnnnnnnnnnnnnnnnnnnnnnnnnnnnnnnnnnnnnnnnnnnnnnnnnnnnnnnnnnnnnnnnnnnnnnnnnnnnnnnnnnnnnnnnnnnnnnnnnnnnnnnnnnnnnnnnnnnnnnnnnnnnnnnnnnnnnnnnnnnnnnnnnnnnnnnnnnnnnnnnnnnnnnnnnnnnnnnnnnnnnnnnnnnnnnnnnnnnnnnnnnnnnnnnnnnnnnnnnnnnnnnnnnnnnnnnnnnnnnnnnnnnnnnnnnnnnnnnnnnnnnnnnnnnnnnnnnnnnnnnnnnnnnnnnnnnnnnnnnnnnnnnnnnnnnnnnnnnnnnnnnnnnnnnnnnnnnnnnnnnnnnnnnnnnnnnnnnnnnnnnnnnnnnnnnnnnnnnnnnnnnnnnnnnnnnnnnnnnnnnnnnnnnnnnnnnnnnnnnnnnnnnnnnnnnnnnnnnnnnnnnnnnnnnnnnnnnnnnnnnnnnnnnnnnnnnnnnnnnnnnnnnnnnnnnnnnnnnnnnnnnnnnnnnnnnnnnnnnnnnnnnnnnnnnnnnnnnnnnnnnnnnnnnnnnnnnnnnnnnnnnnnnnnnnnnnnnnnnnnnnnnnnnnnnnnnnnnnnnnnnnnnnnnnnnnnnnnnnnnnnnnnnnnnnnnnnnnnnnnnnnnnnnnnnnnnnnnnnnnnnnnnnnnnnnnnnnnnnnnnnnnnnnnnnnnnnnnnnnnnnnnnnnnnnnnnnnnnnnnnnnnnnnnnnnnnnnnnnnnnnnnnnnnnnnnnnnnnnnnnnnnnnnnnnnnnnnnnnnnnnnnnnnnnnnnnnnnnnnnnnnnnnnnnnnnnnnnnnnnnnnnnnnnnnnnnnnnnnnnnnnnnnnnnnnnnnnnnnnnnnnnnnnnnnnnnnnnnnnnnnnnnnnnnnnnnnnnnnnnnnnnnnnnnnnnnnnnnnnnnnnnnnnnnnnnnnnnnnnnnnnnnnnnnnnnnnnnnnnnnnnnnnnnnnnnnnnnnnnnnnnnnnnnnnnnnnnnnnnnnnnnnnnnnnnnnnnnnnnnnnnnnnnnnnnnnnnnnnnnnnnnnnnnnnnnnnnnnnnnnnnnnnnnnnnnnnnnnnnnnnnnnnnnnnnnnnnnnnnnnnnnnnnnnnnnnnnnnnnnnnnnnnnnnnnnnnnnnnnnnnnnnnnnnnnnnnnnnnnnnnnnnnnnnnnnnnnnnnnnnnnnnnnnnnnnnnnnnnnnnnnnnnnnnnnnnnnnnnnnnnnnnnnnnnnnnnnnnnnnnnnnnnnnnnnnnnnnnnnnnnnnnnnnnnnnnnnnnnnnnnnnnnnnnnnnnnnnnnnnnnnnnnnnnnnnnnnnnnnnnnnnnnnnnnnnnnnnnnnnnnnnnnnnnnnnnnnnnnnnnnnnnnnnnnnnnnnnnnnnnnnnnnnnnnnnnnnnnnnnnnnnnnnnnnnnnnnnnnnnnnnnnnnnnnnnnnnnnnnnnnnnnnnnnnnnnnnnnnnnnnnnnnnnnnnnnnnnnnnnnnnnnnnnnnnnnnnnnnnnnnnnnnnnnnnnnnnnnnnnnnnnnnnnnnnnnnnnnnnnnnnnnnnnnnnnnnnnnnnnnnnnnnnnnnnnnnnnnnnnnnnnnnnnnnnnnnnnnnnnnnnnnnnnnnnnnnnnnnnnnnnnnnnnnnnnnnnnnnnnnnnnnnnnnnnnnnnnnnnnnnnnnnnnnnnnnnnnnnnnnnnnnnnnnnnnnnnnnnnnnnnnnnnnnnnnnnnnnnnnnnnnnnnnnnnnnnnnnnnnnnnnnnnnnnnnnnnnnnnnnnnnnnnnnnnnnnnnnnnnnnnnnnnnnnnnnnnnnnnnnnnnnnnnnnnnnnnnnnnnnnnnnnnnnnnnnnnnnnnnnnnnnnnnnnnnnnnnnnnnnnnnnnnnnnnnnnnnnnnnnnnnnnnnnnnnnnnnnnnnnnnnnnnnnnnnnnnnnnnnnnnnnnnnnnnnnnnnnnnnnnnnnnnnnnnnnnnnnnnnnnnnnnnnnnnnnnnnnnnnnnnnnnnnnnnnnnnnnnnnnnnnnnnnnnnnnnnnnnnnnnnnnnnnnnnnnnnnnnnnnnnnnnnnnnnnnnnnnnnnnnnnnnnnnnnnnnnnnnnnnnnnnnnnnnnnnnnnnnnnnnnnnnnnnnnnnnnnnnnnnnnnnnnnnnnnnnnnnnnnnnnnnnnnnnnnnnnnnnnnnnnnnnnnnnnnnnnnnnnnnnnnnnnnnnnnnnnnnnnnnnnnnnnnnnnnnnnnnnnnnnnnnnnnnnnnnnnnnnnnnnnnnnnnnnnnnnnnnnnnnnnnnnnnnnnnnnnnnnnnnnnnnnnnnnnnnnnnnnnnnnnnnnnnnnnnnnnnnnnnnnnnnnnnnnnnnnnnnnnnnnnnnnnnnnnnnnnnnnnnnnnnnnnnnnnnnnnnnnnnnnnnnnnnnnnnnnnnnnnnnnnnnnnnnnnnnnnnnnnnnnnnnnnnnnnnnnnnnnnnnnnnnnnnnnnnnnnnnnnnnnnnnnnnnnnnnnnnnnnnnnnnnnnnnnnnnnnnnnnnnnnnnnnnnnnnnnnnnnnnnnnnnnnnnnnnnnnnnnnnnnnnnnnnnnnnnnnnnnnnnnnnnnnnnnnnnnnnnnnnnnnnnnnnnnnnnnnnnnnnnnnnnnnnnnnnnnnnnnnnnnnnnnnnnnnnnnnnnnnnnnnnnnnnnnnnnnnnnnnnnnnnnnnnnnnnnnnnnnnnnnnnnnnnnnnnnnnnnnnnnnnnnnnnnnnnnnnnnnnnnnnnnnnnnnnnnnnnnnnnnnnnnnnnnnnnnnnnnnnnnnnnnnnnnnnnnnnnnnnnnnnnnnnnnnnnnnnnnnnnnnnnnnnnnnnnnnnnnnnnnnnnnnnnnnnnnnnnnnnnnnnnnnnnnnnnnnnnnnnnnnnnnnnnnnnnnnnnnnnnnnnnnnnnnnnnnnnnnnnnnnnnnnnnnnnnnnnnnnnnnnnnnnnnnnnnnnnnnnnnnnnnnnnnnnnnnnnnnnnnnnnnnnnnnnnnnnnnnnnnnnnnnnnnnnnnnnnnnnnnnnnnnnnnnnnnnnnnnnnnnnnnnnnnnnnnnnnnnnnnnnnnnnnnnnnnnnnnnnnnnnnnnnnnnnnnnnnnnnnnnnnnnnnnnnnnnnnnnnnnnnnnnnnnnnnnnnnnnnnnnnnnnnnnnnnnnnnnnnnnnnnnnnnnnnnnnnnnnnnnnnnnnnnnnnnnnnnnnnnnnnnnnnnnnnnnnnnnnnnnnnnnnnnnnnnnnnnnnnnnnnnnnnnnnnnnnnnnnnnnnnnnnnnnnnnnnnnnnnnnnnnnnnnnnnnnnnnnnnnnnnnnnnnnnnnnnnnnnnnnnnnnnnnnnnnnnnnnnnnnnnnnnnnnnnnnnnnnnnnnnnnnnnnnnnnnnnnnnnnnnnnnnnnnnnnnnnnnnnnnnnnnnnnnnnnnnnnnnnnnnnnnnnnnnnnnnnnnnnnnnnnnnnnnnnnnnnnnnnnnnnnnnnnnnnnnnnnnnnnnnnnnnnnnnnnnnnnnnnnnnnnnnnnnnnnnnnnnnnnnnnnnnnnnnnnnnnnnnnnnnnnnnnnnnnnnnnnnnnnnnnnnnnnnnnnnnnnnnnnnnnnnnnnnnnnnnnnnnnnnnnnnnnnnnnnnnnnnnnnnnnnnnnnnnnnnnnnnnnnnnnnnnnnnnnnnnnnnnnnnnnnnnnnnnnnnnnnnnnnnnnnnnnnnnnnnnnnnnnnnnnnnnnnnnnnnnnnnnnnnnnnnnnnnnnnnnnnnnnnnnnnnnnnnnnnnnnnnnnnnnnnnnnnnnnnnnnnnnnnnnnnnnnnnnnnnnnnnnnnnnnnnnnnnnnnnnnnnnnnnnnnnnnnnnnnnnnnnnnnnnnnnnnnnnnnnnnnnnnnnnnnnnnnnnnnnnnnnnnnnnnnnnnnnnnnnnnnnnnnnnnnnnnnnnnnnnnnnnnnnnnnnnnnnnnnnnnnnnnnnnnnnnnnnnnnnnnnnnnnnnnnnnnnnnnnnnnnnnnnnnnnnnnnnnnnnnnnnnnnnnnnnnnnnnnnnnnnnnnnnnnnnnnnnnnnnnnnnnnnnnnnnnnnnnnnnnnnnnnnnnnnnnnnnnnnnnnnnnnnnnnnnnnnnnnnnnnnnnnnnnnnnnnnnnnnnnnnnnnnnnnnnnnnnnnnnnnnnnnnnnnnnnnnnnnnnnnnnnnnnnnnnnnnnnnnnnnnnnnnnnnnnnnnnnnnnnnnnnnnnnnnnnnnnnnnnnnnnnnnnnnnnnnnnnnnnnnnnnnnnnnnnnnnnnnnnnnnnnnnnnnnnnnnnnnnnnnnnnnnnnnnnnnnnnnnnnnnnnnnnnnnnnnnnnnnnnnnnnnnnnnnnnnnnnnnnnnnnnnnnnnnnnnnnnnnnnnnnnnnnnnnnnnnnnnnnnnnnnnnnnnnnnnnnnnnnnnnnnnnnnnnnnnnnnnnnnnnnnnnnnnnnnnnnnnnnnnnnnnnnnnnnnnnnnnnnnnnnnnnnnnnnnnnnnnnnnnnnnnnnnnnnnnnnnnnnnnnnnnnnnnnnnnnnnnnnnnnnnnnnnnnnnnnnnnnnnnnnnnnnnnnnnnnnnnnnnnnnnnnnnnnnnnnnnnnnnnngaattctcaataaaatacaaactagcaaactgaattcaaaagcacattgaaaaggtcatacaccatgaccaattggaatttatctatgggatacaaggatgcttcaatgtgtaaaaattaataatgtgatataccacattaacagaatgaaagacaaaaataacattccaatagatgcagaaaacacatttgacaaaattcaataaggcatcaaaattgaaaggaaagatgtagttacctctgttaacagaagacatgattattatacattgaaaactctaaagactccacagaaaatggttagaaataatagtcagtctttcatatctgctggggatttgtttcaggaacccctcagataacaaaatctgtgatgatcaattccctcacataaaatcgtgtacagctggccctatgtatccatgggtcaacatctgtggattcaaaccaccacagatggaaaatatgtacaagttaggttcatggttgattgagttcatggttgcagaacccattgataggaaggactgactatataataaatttactaaagttgtaggatacacaattgacatacaaaaatcactgctatttctaaacactaacaatgaattgtctgaaagggaaatttaaaaaacagtatcaaataaactactttggaactaactaaccaaagaagtggaagacttaaacactacaaattataaaagattgatgacagaaatttaaaccaaagtaaattgaaagacaacccatggattgaaagagttagtactgtattattaaagtgtccatattactcaaagcaatctacacatttaatgtaatccatatcaaaatcccaatggtatctccaacagaaatagaaaaaaaatcctaaaattcatatagaatcacaaaaatccctgagtggctgaagctattttgagcaagaacaaagctacaggtatcacacttcctgacttcagattaaattacaaagctgtagaaagaaaaacactgtggtattggcataaaaacagacacataaaccagtgaaacaaaatagagaacctaggcataacccacacatttgcagcaattgatcaccctggaaggtgacaaggagacactatatgcagaagacatgctcttgaccaaatggtgttaggaaagctggatgtctacatgtaaaagaatgaaatcggatccctagctcacgccttatgtaaaaattaactcaaaatggattaaacgtttaaatgtaatcactgaaacaaaactcctggaagaagacaggagaaaacattcttgacattggtcttggcaataatttgtttagatatgatgccaaaagcacagacaacaaaggcaaaatagacaaatgaaatacatcgaattaaaatgcttttgcacagcaaagaaaactaatgaaatgataaggcaacctacgaaatggggaaaatgtttgtaaaccatatctcttataaggagttcaaaaaataagaaggatacatacacatcaattccaaaattatgaataacctaattttattttaaggcaaagaacctaaataaatacatctccagagaagaaattcaaatggctaacaggtacaagaaaatgtgctcaacatctctaaacttcagagtaatgcaaatcaaaaccaaaatgagatatcatgtcacacctgttaaaatggctattatcgaaaagataagtgttggtaagaatgtgaagaaaaggaaaccattatacactattgatgggaatgcaaattagtaaaacacagaaaacagtattgaggttcctccaaaaaaaattgaaaatagcactggcctggtgtgatggctcacacctgtaatcccaggatttggggaagccaaggcaggaggcgaggagctccagaccagcctgggtaacatagcaagacgccatctcagaaataaaattagccagacatggtgttgtacacctgtagtcccagctactcaggaggctgaggtaggaggatcgtttgagcccaggagatcaaggctgcagtgagctatgatcttgccactggactttaccctggatagcagagtgagacccagtttcaaaaatggaaaaaagaactaccacataatccaacaatttcacttctggatatatgtccagtgaaattgacataagagtcttagagaggtgtctgtcatcctctgttcattgcggcatgacacacaatgaccaaaatgggaaaataacctaaaggtcctttggcagaggaacagatgaatgggtaaagaaaatgtgacgtgtatacataaaatgaaacattatacacccttaaaaaagaaggaaatccttctatttgtgaaaacattgatggagatggaagatattgcgccaagcaaaaatgcaagacacagagacaaatacttcatgatctcacttacatgtggaatctacgactgtcaaattcataaaaacagagaataagacagtggttgccaggggctcagggaggggaaatggggtgatgttaattaaattgtgcaatgttcaagttattataatttctggagatataatgtacaaagtggaacaacactgtatcatattgtgttctgctaaaggactagaccataaattaattactgtcaacagacacacaacggtaaatatgtagagataatatgctaatttgcttgattgtggtgatcgtttcaaaaagtatagaaatatcaaaacattaagttaccttaaatttacacaatttgtatatgtcatgttatcatgataaagctgttaagaaagatttagtaaatcatgtctacaacctgggaactttctcatgacagggagggctggagtaggaaaatggaattttgcaacaaggatagggtgagggacatggggaaattattgatcaagtatttaagaaatgacctgggtggaagctacaacaaagggtatgagatttagctcatcagtcctcaaatttttggtttcaggaacacttcacatttttaaaagttattgaggaccccaaagagcttttaattatttggattatgtctatctatatttatcatagtagacattaaagctgagaaattaaaaaaatatatacttatatgtttacataaatcacatttttatttaaaattatcatttttaagcattaaagtttgggagaacagtgacattgttttatatttttaggtgtgtctttaatgtctggtttaatagaagaaaacttgttctcctttctacttctacatttaatttcttttgacatcacatgtcaggtagcctctgggaaactccaattatacttgagagacaaggaaagtggaaaaggtaaacaaaacctgtgtatttttatgaaaagacttttgaccttgcagagaccctggaagggactcagggacttctcagggttctctggatcatgtgttcacagagtagagggtaagtctgcaagagaaagcagtgattgggtgtgggaggtcttgctgagaggtggtagagaagaggttggatgtggagaaagtatggtccttgttttcatttcttttccctttcctttggcctcttgttgctgggattttctctttagatgatcgtatcataaattagaaatagcattaatgaacattcttgatactgcctaatgaaagttttagttttgtctttctgagtcttgatacatttcaagaagtcttctatctcatttattgttcccacccaaatttggaatttaggaagagtcgatatagctatatttagattatttatctctctgaagacattttgggatcatttataaatctctataaacaatgctctgatgtccctttattttgtttagagactgggtcttgccgtgttgtctggagtggagtggctagatcgtacctcacaatacacaatacaatcaaactcctgagctcaatgttatccttccactcagcctccacagcagctaagtctgcaggtgtgtgccagcacgcctagctttggattactattattatttttgtagaaatgggggtttcattatgctgcccaggctggtcttccaactcctggcctcaagcaatcctcctgccttccgccgtctgaggagctgagattacatgtgtaagccaccatgctggtcctgatgtcatttaagtacaaacatgatactatattccttgtagaaagtgccacataaatatactctttttgaaatagggtcttgctgtgtcacccaggctggaatgcagtggtatgatcacagtcactgcagccttgacctcctgggcttaagcgatcctcccacctcagccttacaagtagctgggacctgaagtatgagccaccaagcccagcaaatttttcaatttttggtaaagatcggcgtgtcactgtgttgcctaggctggtcttgaactcttgggctcaagttaccctccgcccaagtctcccaaagtgctgggattacaggcctgaaccaccgcaccgggtcctaaaaattcattcactttctttgtttgtccacagggtgctgctgtttcctttctaataacatgagacagctcactcaagaacatcaagaacatgacattctctaaaaaaaatcacagtagttccttttccataactatgaagttttcaaggtgttatcaggtttatttcatagaaagaatgtgtaaaatttttcatgtagaaacataatcttttagcaatgagttagttaaaaaatttggcattgtcagaatgaagatttccttttccctataattttttttattataattatatttttaataatatcaattgctttataaaaactcattacattatatacccaatgtctgtgaaattgtctgctttgaagcacagtgaaataatcaatcagcatactgggtctaacacggttccttccattttaagaaagctatttacactccaatttgcaagttggactttacaaaaattaaagcatttataaaatatactaactatgattgttttaaaaagtaatgttttttttatggtaaggaaataaattgaagctctgtgttggaaaatgcagaaaacaaatcagcattctttataaatagattttgctgctggtttagaaattacctaatgtgctttatagatgttggaaaatgaaatcagctgcagttagcagtgtgcatacatcgtatttgctgtgtcactttcagaaaggttatggaatattggcaggtcaggattctcaaaatgagaagttctaagaagaggctaaatgaaaaagaattttgaaagcaaacctagttgtttaatataaacatggacgagttatggggaaatcctggactgggagctagcagatctatgttctgacttttactaagtcattggctgctacagcaggccaagcagacataactgccaaagctgcctgggagttgggttgattggcaattggcacagggagagaggacaattgccagagtaatggacaaatattcagggtttcatgttcagtgaagcagaacgtgcatttgtatcccaagggcaaaactgacgctagaatctgggcctcctggctgaatctgagtccacagtttgatgagtaggatgaagtagtctcagaaatccaagccagccagaacccatgaggtgtgctttgcagatattggctggcgagctgcattaagatgtttcattccattgagcaaacattccttgattggttaggttagcatcccacaagagcagagacaaattcttcagaatttgtccatgaggctatagtcccagagcttatatttcaagggaggaaactgcatctcaggatggtaggtgattacagctaaaccgaattctgaaaataaaaggaaccctatgtctttttctgctcaggctgcttctacaaacaactgtagactgagtggcttaaacagcatatacttgtttctcacagttgtgggaattcaaagattaaaatctgggccagcagagccagtgtctggtgaaggccctcttactggtttgcaggtgttcttgttgtatcttcacatggctgagagaagagggctctagtctcctactcttcttattaggatgctaaccccactgtgggaactccatcctcatcaacaccaaattacttcccaaaggtcctccttctaatgccattctattgttagagtttcaacttgtgcatttgttgaaggaaacatgcagtgcacaacatctaatctaatcaaatcagttgtcccttgaataaaattctagctcctataacaagacttaaaattatgacttggttgttgccaaaactgtctatctggatttgctagaaatcaaacatacttgaatatttcctctaaagattttctcattcctaccctattgtatatatttacagaattcttaaataattacatatacaaggcttctattagctctgacgagagcttctattaactttgactattgcaagcagttttatcgcactgtaggtaaaacatgtgctttgaaatcatatgataaatttattaaatgctaaggactttatattcactgtttaattttatcatcttaataaccttcattattacctccattaaacactatttgttggctacttacattattctgattttgcaaatctaaatttgagaggctttcccaatgtcacataagttaataagtggcatagctggggtttgaattaaagtctaccggattccaagatctgtttaccgttgttctacaatatgtactttttaggtccctgagaatgctaacaacatttcttttgaaatctggatagcagctttattaatatgtgattagggcaccatatttcaggcaacaaattctttgaaatctttcatttccatagtgagataaggatcagttctgtggcattgtcagccagaaaacatcatttagagactatcttgtacaataagtagaagacacagctggcggcctgcggaggacagaaagctcacagcttctgtccatacccctttcacttcctcctcaaggagatggacctctgtggttggtcaagcttaaggatcttttatgtgccacagctaatggtgaaatcttcctaattctaggtgaagattaatgggcaagttggagagttaaggtagcttgtggctgctccttttagaagaaagtctgatcattgctctcttatttgtggaacccctctgttcccccaaatgcttggtaagacatgcctgaagaccaatcctgtgtcagtagacttcatatctactctcttctaccaatcacacaactacagacaaataagaaaaataaaacaaagctcagacacactgccctggcacggaggccactctccagctggctgcttttctctaccctggcgcctcctgggcatttggctctttcttagatcaaagcgagacataagtttgggattaaagagaagtaggtgaaaggggtctctggcctgttttggcattagaccaagtaaataacagagttctggcttaagctcagctctgtagagctttctctgtgtttggggaaaatctccgatagtaatgaagtgatattttactgtgcttcgttttctgtacatatatctctttcttaggtatgttgtgagggaggagattcgttccctggataaataccatcttaatcaccttcattaccaactttattttatttgcagagttaaaatttaaatagacattcaggaaacaagtctggtgagagaattatgttacgaggttaatctttcagcatctgccttagggacattgattattttcccccttgtttttcaccaagctccaggcttgcaaaaaaattgtgatgtggtctgaggcaaacttactgattggctagtggtaagttaaaccataacctgtaggaccgctgggaaccactacttgtcatcggccagaaatccattgtttggaggtgtgcgctgggaaggctattcatacttattgatacatgttttgttcttggcattatgttaagtactggacacatgcaacaatttggaatatcgttacattcaaccctcacaatagtttgatgtatatgttattagtccggtattagagacgagtaaacaagattagaggaagggaagcacacagctgaaccacataggcggcactgggattggaagcagttccgtctcaccctggaccaccatttccatgctgtgtctccactagaggatcctttctttggttcttctaagtcattagtcatcaataatttatatccaaactgtaggtttcacaggaggagatgccacttgaagcttcatggcttaaaatggaaatggaatgtggaacatggtgggaagcaccgggaggggtttattgataaatttcaagtactttgtggggctctgaaagactgtcttcaaattctttgtcctactacctctttcatattagttgaaatgtcatatgggtatatcttttgggttaaattaaggaaaatctccatgaaaagtaaaaaacaaacaaaaaaaaccccaaaagaatagaaaaagatactatgaagaatccactcagatttctcagagttttattaactcaaaaaagccttggtccagttggaagaagacagaattgattttgacaacctctagcaaaccctttagcgttcaatgcactctagaccatgagtataaagaagttcacttaataggttcaccaaattagttagtttgtgtagttcaaagggaaacagaaacacaggactgtgaggttttgacaggggtgaaaggaaagcctgggtccagtgagcccaggcaggccatgaaggggcagggcaggagaaggacagtgctgggaggctagggaactggccacttctgtgctggctgaagatcacaaaattcaacacagctttctccaaatgcttcccgtgcctgatggaattaaacagagctctgagaaagacagcaccggggccgaggatgcatccggagctgcctacagtcattaatatcttggccagtggctatgcactcagggacaatttggctagctttcttgatccacaccagaaaactcgcttttgaattggtttggaaagctccaaaagggacgtgcttcatgctattggtattgctgtcaaaaagaaaagattctgcttttcatcagctgttgatttttgctctctgtatttctctagcatgtgttgctggtggccctggttatgctaacaagtagatagtgtagctgcaacagcagaacagaaaagactctcctggattctcagttccaggctggcctgggaacaggcttagggatgtttcaatgcttgaatgtaggtgagctggagatctgtggcaattcttttgacatgaggctggacattctttatagcttccccagacacaggaattggcagagcttgaaaaagaatcactggcaggaggttcattttctttattgctacctccccagccataaaactaaaagctttttacctaaatcacgttagccatctcgtgggagtaggagatcatttccttcagagtctttcccgattggagtctagtcctaggatggtttgaacggtccgtttgaatttgaagagctttctaattgatgcttctcatcccctctccaaccagtcttatttggtgtcgtctgcctttccccttcctccctaccaaacctcagagtcttgaaacaaaaatctttgtattgtaaacttcattatgctaatttcatcacttcaaacgaaatttcccttgtttgagtttcctccaactgtgtgacttagggctgttgaactctttcatatacacaggaaaacggaaacctcttttgctgtctagtgattgtataataaaacattttcagatgctaatcacatgctttgagcttggttaatgaatgaaattctaaggatattcttatttgaaaggtttaaaatataataactgtcattatatctaattctgtctacatttctggtgtgaaatgagaagtcaggagccctaccatctacacagtacatggttctaccagctatttctgtgttacttcaagcaaatcacttcttttctgccttttctttctttttatgtaaaatgtggataactatctgtctcactgaattcacagagtgactgtattatgtacaataaaatttattgaaaagcataaagctctataattaggtataatgttacctgtaatttataagctttttaaatcctggggcagtggaggaagtattcctcttcctgtaaaaggacatccctctaataatctcccttcttttcctgacttttcagggattctgttcattgcttttccatttgtcatctgcatcttcaatctctctccttcttgatgcattctgtcagcatttaaatataaatttttcatttaaaatatcttctattttggaggaaccttaactttgactctgtgtgtctttctagctatcaagtcatctcctcctttcttggcaaatttttctcaagtattttccacacttactatctcctttttctcattttcctttcactctttattcaggtcagtttggctttcactttcatcaagcctatgaaactgcttgtgctaaggtcaccatataagagtgctaagggcttccatcacaagctgccacagactgagtggtttatcttctcaagctctgaagactggaaatccaggatggaatgtcagcaggtttgccttcttctgagaactgctgccttgcagatgcctcccttcttgctctgtcctcaggctgtgttgcctgtgtctcaatctctttttagatggacacctgccatattggtttagggtccacccatatggttttatttgacctcacttacctctttgaatgccttctctaaatcagtccctctgaagcagtggggatcagctcttcaacataggaatctggggggacacaattcagcacccccagaactggtgattcctaaacatcatgaacactattcctctttctctctttctttctctcccttttttctttctttctttctttctttctttctttctttctttctttctttcttctttcttctctttctctctttctctctctctctttctttcctctttctttctctcttccttccttccctccctttcctaaccttcccttgctctctcttccttctttccttcccttccctttccttcccttcccttcccttcccttcccttccctttcctttcctttcctttcctttcctttcccttcccttcccttcctttcctttcctttcctttcctttcctttcctttcctttcctttcctttcctttcctttcctttcctctcctctcttttcttttcctttcctttcctttcctttcctttcctttcctttcccttcccttcctttcctcactctcctctccttctttcctttcctttcctcgcccttccttccttccttccttccttccttctctctctttctcctttccttccttctatttatttacttttgtttatataaaatttatgggacacatgtgcaattttgttccatgcatagtggtcagttcaaagctattagggtatccatcaccaaaataacatatattgtacatattatgtaatatataagtccaatggggtctcaggaacattcggtagagtagacccctgacctcttcctccagcttgaactattttcttatcagcttctccctctttgcccaaactttaaatgttgaagttcttaaatcctgggtcctcttctgttcttattccatactaagcttgtccaacccatggcctgtgggcaacgtgtggcccaggacagctttgagtgcagccaaacacaaatttgtaaacattcttcaagcattataagatattttatgatttttttaagctcatcatctattgttaatgttagtatattttatgtgtggctcaagacaattcttcttattcgaatgcagccagggaagccaaaagattggacaaccctgcctacacagactctagacaaggttttattaattcctatggctttagataccatagatatgcatatggctcctacagacctctcctcccaagctccaaaacattatgtgcacctgccatcttgaaatctccactgggattttcacaggcattcctaaaatcagaattcaaaactcttgagatctgcccccacatctatgccacttcctcaatcatttcccttttgttagtttatttcttcttcagccttaccattctttataaaaatcgtctccatttacccatttgcttcttccagaaagcatcatcatccttgatgctttcttcttcctgcaacccccctaccatcacaacctgcaaccaagtactgttatttcactttcaaaatatgtgctaaaattatctgcttctgtcatccgcatctttcagctgatctgtaaacatatactcgtctttccaacttttggcctctccaataccttttctatggcacacccagagaggttcttcaaaaatttcaattagatcatgtctctccttcgtttaaaaatatttaatgattttctacccacgaaataattctgctagactgcaagctctaaagatgcaaggactaggtttgccttatttgtttctgtttatgcagagcctagccttgcatttagtaggaagttaacacattgacctagatcttgtccaacttctcagcctcacctctcatggaagcactcatagacctcagtccagttactcttttctgagatccctgagctggcgtggtccagggctgcctgggccgtgatgcattcactcctgctttgttggctggtatctgcttatattcttgctactgtaactgatgtccaaggcagtcacataggcatctctgggagcttgctagagctcaggcaccaccctagatccaatgaatcagaatctgcatgttgacaaggtccccaggttgttcatatgcacattcaagtttatggtgctttgctctagatcccagcctgagtgttagttctttaaagagacctttcccaactggccaaatcgtattaggtcatgtgacggattcacccacacggtctgtgatacagaagggaaaaggagttgaggcctattgatcagaagctgcccattttacagttttacctaagggtgatcctatcaaaagttctggattttgtagagaaggatacaaagtagtgaatagtttgatttgagaaaattgaaaattgccagttttcttgccagttttctttgctatgtttgctctccctctgaaaatcccttgttacaagtccttagttttagtttgccacattatgacacgatgggaataatgcacagcagtgatcctcagttggtttgggttttcaatacacaattgatctatggttgtggcatgcattgtagaatgtccagctagaacacctattctttcaattactttcattactttcaatggcaaaaccacaattacttttgcactaatgtgatagctttgctacaagtcaattgttcagttttttttgttgttgttgtttgtttttatttttgcaaacactttagatactgcatagtggatggattagtttgtggttcctgggatcttctgtgtattctgttgaagctcaataatcacattactgcggacctccaaaattttacaaaagactgcatagtgagtattcagccgataaactaaaccacagcttattactgtgagatgaaagaaagcacaccaatgaaaagtaaacactgtttaaacctatctcaatgaatttctaaagtgtcatacatttattatattctctacttgtaaaatattttgttgtgtgtattgtcaagtatttcaggattttatgggtataaaatattctattaatttaactggaaaacttgtagttattcaacaagcaagctaaaagtgttggcagagatgtaattttaaagcacaattccactcattccttcagtattacaactgctccttgtttgtttaataatagaactgatgagtagttaatttgagagaaaagctggtgcaggtgtagtgctatttagatgtcatggaggacacatgtgacatctgcagctagctatatggtaaaagcaaaacagaagttaaaatcagccctgtgtccaatctgcatagttttaggcttcagagagtttctctgtatgttgaggcaggaagtttagtagaattccaagggaataagagaggaaccaacatttgtagattttgccttctatggggaaactcattcaatcatcaggagaactcttcaataggttttatttgctccggtttacctagatgaaaaattgagacccagaatccatgcttttctttcctggttacacattagaatcaccaatgtgatattaaacacacacacacacacacacacacacacacacactgcacaacgattaagatggctgctatcaaaaaagaaaaaacaaaaaaatcaggggccatgcatgctggttcacacctgtaatcccagccctttgggatcacctgaggtcaggagtttgacagcagcctggccaacatggtgaaacctcatcggtaccaataaaaaataataataaaacaaaaaacaacacacacacacaattagtcgggcatggtggcacacatgtgtaatctcagctaattgagaggctgaggcatgagaatcacttgaatctgggaggcggaggttgcagtgagctgagatcacaccactgcactccagcttggagacagaaggagactcggcctcaaaacaaaacaaaaacacccagaaaataacaagtgctgacaaggatgtggaaaaattgtaactcttgtgcattgagggtgggtatgaaaagtagtacatcggctgtggaaaacatacggttcctcaagaatttagacatagaattaccatatgattcagtaatcccactcacatctataaatctctgtatctttatctacctatatctatcttcaaaagaatggaaagcagttactcaaatagatacttgtgcacctgtgttctctccccaccccatccccccccttttttttttaataaatagggtctcattctgtttcccagcctggagtgcaggggctgtttataggcatgatccccctgctggggagctgtccacaggcacgaccccctgctgcggggctgtccacaggcacaatcccctgctgcggggccatccacaggcacaacctccctgctgcggggctgtccacaggcacgaacccctggtgagggactgtccacaggcatgaccccctgctgcggggctgtttacaggcacgatctccctgctgcggggctgtccatgggcaggatctccctgctgcgtggctgtccacaggcatgaccccctgctggtcaaactgggagttgtgccctgctttgtctccaacccaggccggtttgcccctccttaggcaacctggtagtcccttatcccaggaggtcactgtactaatgtctaatttcgtgcagacatctgatcaacacaacacaacacactgcagcccagtactcctgggctcaagcaatcttcctgcctcagatgcctgagtagcaggaactacaggcacatgccaccacacctgcctgctacacctgtgttcattgcagcattacagccttatttacaggaaccacaaggtggaaacaacctaaaaagtctattgagggatagatggataaacaaaatgtggtatagacataaaatggaatattagtgatctttaaaaagggagggaattctgatacttgctaccacatagataaaacttaaaaacattatgctaagtgagacgtcaaacacagactacgtgattccatctatatgaagaacctggaacaggcaaattaatggagacacaaagtagaatagaggttttcaggactggcaggaagtggaaatgggcggggttagtgtctaatgggcacagagttcctgtctgggatgatagaatgtttcagaaatggatagtggtgatgattgcacagcattgtgaatgtagctaatgacattgaattctttaccagaaaacaaaagcaaaaacagaaacacattgcttaagcttcccagtcagacaggtgacgtgcttggtgtgagctggggcctgagaccaggctgccctcaccagagtggcttcaagacccttcttggttgtacttaggcctgattgctctggagagccccatacatgaaagccagctctggttctatctcttctcacttcagtcctacctacccccaccatcccccagctgggcattataagaaaagcaagatgactatgagttttctgattatttatatgaccaaataatctcagggactattgctaactaacccatgggattcccactaccttcatgagtttcagacgaggtgaagggtccctaaaatcctgccacctagtcaggaactcagttgtcaataatttctttatttgtgatacaagcaggggtggggaaagagaaatgaacagacttggaagcttctctgaggccctagagaagacctctgggccccgaaaaccagacgccaggagaaaggagggtggttgatgactccccactctttctccagcccctgctcctctgtttctccccttcacccactgcagcttcctcaggtcctgggtcccgtgccatcatctcttcgaatgacctcctttctatccctgttaataaaggagcatcagctaagtgaacgtggtgatttgcattcacttatattgattcagaaattgtgtttaattccacacaagaaaaagaatgtggatctttttcaccgtgggaaaaaagtcgttaagtatcatcttaatcatgttttcctgggatataatctatacatgatgcctatttaagccttcattgcatctgtgcacgtggtttgctttcctcttatgtgaaatagcgttggaccacacgagtttgggccacagctcaggaaaacacaatcctaaatgtcgtaatcccaaatgttgaagtcccaaaagatctaaatctgtacagtctaaaatcctgaaaattacaatcctaaaaaaacaaaattctgaacatacaattctggaaaaaaattattaacacattctttaaaaagcatttattgggcagcgcatggtggctcatgtctttaatcccagaacttttgaaggctgaggcgggtggatcacaaattcaagagatggagaccatcctggctaacacggtgaaaccccatctttactaaaaatacaaaaaattagccaggcatcgtgatgggtgcctgtagtcccagctacttgggaggctgaggcaggagaatcgcttgaacccaggaggcagaggttacagtgagccgcgattgcaccactgcactccagcctgggcgacagagtgagactctgtctaaaaacaacaacaaaaagcatttatttatatttttaaggtggaatttgagaaacgtacaaaaacacaacggaacgcttcctaggccactttacacaatcaataggcaataataacatacatatatttgcaagcataaaactcaggtatgctaacgatagtctcacgggtataatggtaatgagcagatgagttgtatttgtaaagaaatgggtcaaaaagcaaaatgtataaaagcatggttggtaactgggtgcactcagctttataacttaggtcatctggaatattgtgacagacaacataagtcttttgaccagattcatcaaaagctgggatgggtcaccatctaatatgtagtcaaagagctgagatcctgaggaattttctctttcccaaatgcaaatgtgcaaaaaggatatcttctcatttattaaggaaactttaatgtttttatgtgcatgtgcaatggttacacacaaagtcagtgttgtgataatgcactcttgtggagttaaatttgcaaaaaaaaatgcataaaacaaattagaactctctaaaagtctttgcaaaatttataccttcagtattggaaatgatactaagatgaaatacacagcatagcaacttgtaaaaaataatggtgacaatttaaaatagtggaaaaaatggaaaaagaaacaactaaaaagaaaattgacacatacaaagtatattacatggatagattatgggcaattgcagagttcatcatagctggctgactttcatgatcattagctatattttgaagtcatgcatcacgatgaatagttgccttttttgtttttaggatttgactctcctcataaaatacattcacattcattttctacgtggcactgctccttttgaaattcttctataatttgatacacactgacatgagcatttcctattacattttccaatcttctatgccattctcgtctattgttttgagtacgtggaaatccattttgcaggccctcatatacaggccactcatttggcagaaacaatactcttgattgaacagcaacaccgttgcctaaatgacttcttatcctaccttgcacatcattattttcaaaccagtatgtaatatttctggcttcttcaggcaattgtggttttaatttatcaaaagctcctggaattttatcaggtggaaggaatgccaatacagacaaatgacacatttttaaactaaaattttcatcattgccagatggtctggccaatccactcacctgaattttctggcaaatgagctgggctgaagggaagatataaactttactggtaacaacttgcatttcacttttagaagccttgatcacacctaattaaaaacttgtcattataatttggggatgcaattgaaatctattttcttctgcaaagccctccaaatcttcaaataagcttttaaaaagtacttcactttttccagttattaaaccataaacatgcagattaaattacagaattttgtaatccaatgggggcataaactgtataaagttgatttaaaaaacccactggggacagttttgaaagtgccgttcatcagccaaagtgaaacatgcaccagttttgttatgttaaacttagtggtaaataaacatgtttatcttttttgacagtcaaatccctaatcaagaatagttcatgatttaatatgccttgtagcactggaggaagctctgtgccaggaggtgtctggctcagaaggccactgaattttttgaactatttttattatctcacaaaaggcattttgtgaaggcaagcatggtgctacctgtagaggtgtttggtacatgattacataatttggcagacaagattttgtccattttttactttcattttaacttcttctgtgatattcaggacattcaaaacagtgacagcagatcttccccacctagtccgctcagacccacacactgatctcttctgagtaaaccatcacagacatacccaaaataatgctttcccagctttccagggattccttaatccagtcaagttgacacctgaaattaagtctgcaagtccaccccttgtagatttggcacccatatggacctccttaaaccatacataatttccaaataaaaagaaagcaaagcaacagttgtacctaacacgatgcaactaacttggtacaactctcctgtgattgtgattttctggattttagatgttaagaatttagactttaggactgggcatggtggctcatgcctgtattcccagcactttgggaggccaagtcaggaggatcacttgagcccaggagtttgaaatcagccggggcaataaagtgagaccccatgatatggtttggctgtgtctccaaccaaatctcatcttgatttgtagttcccataatccccacatatcatgatggtgacccagtgggaggtaattgaatcatggaggcagttacccccatgctgttctcatgatagtgagtgagttctcacaagatctgatggttttataaggagcttttccccctttgcttgtgcttctccttcctgccacctcatgaagaaggtgacttgcttcccctttgcattctaccatgcttgtaagtttcctgaagcctccccagctatgatgaactgtgagtcaattaaacctctttactttataaattacccaagcttggttatgtctttattagcagcatgagaatggactgatacagtaaatatgtactgaggtagtggggctttgctataaggatacctaaaaatgtggaagtgaatttggaactgggtaacaggcagaggttgaacagtttgcagggttcagaagaagagagaaaaatgtgaggaagtttggaacttcctagagacttgcagaatggttttgaggaaaatgctgatagtgacatggacaatgaagtccaggctgaggtggtctcatatggagatgaagaacttgttgggaactggagtaaagatgactcttgctatgcaaagggactgatggcattttgcccctgccctagaaatctgttgaactttaaacttgagagacatggtttagggtatctggcagaataaattcctagggagcaaggtgttcaagaggaagcaaagcataaaagttttaaaaattttgtagcttgatgatgagatagaaaaggaaaacccattttctggagagaaattcaagccagctgcagaaatttgcataagtaacgaggaactaaatattaatcaccaagacaatgggaaaatgtcttcacggcatgtcagagaccttcacggcaactcaaaccatcacaggccaggaggcctaggaggaaaaacatggtttaatgggcccggtgcagggacttgctgctctgtgcagtctcaggacttggtgccctgtgtcccaatcatggctaaagggccaatgtacagctcaagccatggcttcagagggtacaaggcccaagccttggcagcttacattaggtgttgggcctgtgggtgcacagaagtcaagaattgaggtttgggtatctacacctaaatttcagaggatgcatggaaacgcctgggtgttcaggcacaaatttgtgacggggacggagccctcatggggaacctctgctagggcagtgagtgcagaagggaaatgtggggtcagagcccccacacagtccccactggggcactgtctagtggagctgagagaagagggccaccatcctccagactccagaatggtagatacactgacagcttacactgtattgcctggaaaagccacagacactcagcaccatcctgtgaaagcagccaggaggaaggctctaccctgcaaagcaacaggggtggaactgcccaaggccatgagagcccacctcttgcttcagcgtgacctggatgtgagacatgaagtcaaaggaaatcatttcagagcttcaagatttgactgacccattgaattttggacttgcatggggcgtgcagtcccttcattttggccaatttctcccatttggaacagatgtatttacccaatgcctatatcctcattgtatctatgaagtaactaacttaattttgactttacaggctcataggcagaagggccttgccttgtctaagataagactttggacttggacatttgggttaatgctggaatgagctaagtctttggggaactgttagaatggcatgatcatgttttaaaatgtaaggacatgaaatttggaaggggctgagggcagaatgatatggtttggctgtgtccccacccaaatctcaccttgaaatgtagtttccataatccctacatgttatgggaggaacccagttggaggtaattgaatcatgggggtggttacccccgtgctgttctcatggcagtgagtgatacctgaaggttttataagcggcttttccccttttgctcagcacttcctggtgccttgcttcttgtttgcattcaccatgattgtaagttttctgaagccttcccagccatgctgaactgtgagtcaattaaacctctttcttttgtaaattacccaggctcgtgtatgtttttattgggagcatgagaatgaaccaattcactctgtctctataaaaaaaagagaatttagaccttaggaattttaatctttcaggatttcaacattcagtgttatggtgtttgtgactgggtcttctgggattatgatcctcacctggagtaaacagcctcgcagctctcttcaaactatgatcctattctcccactgcctcctgagttcagcctcttcaacttggctaagcttgcctttcctttcctgtctgcttgctttcttccctctgattaatccaaagtaaaatttgactttttttttccattccaacaactccatcttctatcacatatctcctttcatgaagttggcccatgataatgtttctgttgacaacagtataatatagacaagattgcatatagttaaagtacgtattttatttatttggtggcgcattctaataagaaattaaaactatttcttttaaaatcataatttaatcaccaggcagagcgagtaaagagaaataagtttcagaatgtcacatctgtcaaaagtaaatgctgatttttattgaggacttccttatttctgccaccagttgactctcatacagcttgttcccaatagaatctagtgtggaattggcaaatgtggtgtcatacatgcagcgttctactggagctgataattaagtacccagaaattttatgaagtgtttgtcaaaccatcagtagaaatatttacacaatgtaaatcagcaaatgctacaaatctgggctttcccccacccaaccaataggtttgctagcatacaacttttattcatcttgtaaacgttcagaatttctataaatattcatagactctcctatactgagtgtctcagaataactcgaaattcttacaatagccagtgaggctgagtgtgagttgacccaccccagtccctctctctgacctgtctcctgttagccttctgactcccagtgttctctacttcatgcacatgggctaggcaccctgctctttgcctgccttttcttccacgagtgctcttccccagatatctgcatagctggtgccctcacctccttggaatctttgttcaaatgttatcttctcagtgagaccttatctatataagttttctatgattgctggaataaattagcacacctctagtagcctaaaagaacacacactctctctaggggagagagaacactttcttaccttctccagctttgaaaggatgcctgcatcccttggcccctggcccccttccaggcagcaaccacatcattctgaccctagctatcacgcttcttgcctcagactctcctgcctccctcttttgcttttaagtcctcttgtgatgacaatgggccaacatgggtaatctagaataatctcctcatctcatgatccataacttcatcacatccataagtcctttttgccatatagggatatggacatgtagaaagtccattcttctgcctattactccctccttgagcattgtaactaccttcacatctacctgctcccagcattcctgagctctcttccaaacttaatttttctctgtgccacttattaccttccggcatattatatattttacatatttattttattaatgatctgtcttttctcactggaatataatttgcatgagggcaaacatttttgttttatatcgttgacatattttcattatgttgaacagtgccttgcttttagtaaggattcaagaaatatataggttttggctgaataaattaggttgagaagtttggggggaaatcctggcatgatacagaagacggttcccagtgatgggaaagggccatgtggttgggcctctacaggaagccgggatgctccagaggtcccccagggcagagctgctttgctcacgttgaactctttgcccgagctctgatttctaatgttttcttgcatatttgtttttgctctgcctttttttaattaattttttatagatatgaggttttactatatttctcaggctggtatcaaattcatgagctcaagcaatcttcccacctcaacctcccaaactgttattactagaggtgcaagccaccacacccggcctgcttttctctttctttgaaatatactcaaaatgtttatattggtttctaactatagatcatgaactcctgaagcaaagtaaccactttgttcttcattatttctttcactcttctactctgcactgtgccagatattggatatgtaggtgccaaacatttacttttctgatttcttacattttatttcttaaaaatcagcctaaccacgttgtagagagggattatttccttcctttgttttgaaaatttgtgcatgcccaatgcttacattgtgcggttcaatgttgcttcagcttttttttttttttttttctatttttgccagacttccgaaactcttaaaagttgtctgtggtcagcacagcaaagaacacgctttagctttgaaaaaatctttaacatgaaaaaaatgcactaacattgttttcaatgtaacataggctagaatttgcctatgtttgcacatgctgagaattgtccaacccggttgatgtgttcacctcttcagcttggaccttgttgtgaatttatttacaaacatcagttgccttcaagccatcctttctgctgtatgttttgtagccttctatagtagatacacaacagataatgtggagagaaaagacataagaagaggaaggtaatgagagacgttgtcaaggtagtaaccttcttggtttctttgaagaatttgttgcctttctactaagacaacaaagaagcattttgttactgaccgcctaaaaccactcaatctcaggtgaatgcatcacttgccaagctgttggaatgctatatgtgttttgttgcacaattttttggttgtttatttggttggctttttggaaggcaaatttggaaaggggacctacacaggagtgctgacccacccacattcccttattatcattacagacaagaagaaactagcagagctaagaatggagtgaagaaaggcagtgtgataagcaccagcaaagagttgagggctgttgctctctaaattattatttgattattttaaaagtatggaagttttctagtcactgaagaaaggaggtgtaagtgcacttatttttatatggagttacttaactacctcctaaacacatacgtggcaattgtttttgcttgtgcaaagtattttaattagcaagaattcatatattgagattataattagagagctcaatttatatatttgctatcctgctcaagcctgacatggaaaaaaaaaaccaagttcactccaaaatatatagcttcaaaataataaatactggaaagtttgctgtgataactattttgtacttttgtacaaaaaaactaaagaacaaattacctaaagaacaatttgctaaacatgagaaattgcacctttgagtatatacaggtaagataggaagagtgttcagaccagtaaattatagtttatattgaagataatattcagttgattcataacaaataaccagcattcatgataacatttcagcatttccaaggtaccaagtgtactgatttttaaaaatatattttagaaggaatttagaactggtatttttaatgaagactagcatctctgatgttgcaacatgtatgtgaaatgggtgttacatctatcctgccctttaacctcaccgttaacaaagtggctgaaaataacagcaagaaaaaatcagtctaagggagaaaaccactaatgctctcaattctctctctctctctctctctttctctctctctgtgtgtgtgtgtgtgtgtgtgtgtgtgtgtgtgtgttaagggggatggcgggtggtggtcttaacccttgaaagaaaccttctttgtataggaagcatatttcggtttaggtacaatgataagaaagtttaattttataatctataagaccagataccttcagaaatgatttttcctgtgggatttctatgactggtattctgactagtgtgaaatggcagaattggatgtctatatctacacccatcaaaacctcacagcttcatgcactgctataacttttctgttaactctgggtaaattaggaggctggtacaaggaataatttcaacttcagattttacagtttgtttacgttaagggcagaaagatctacttttcaacgatctgtattttaagatattgacttttcctggtgctattttatgaatatggataaaatagaattcttattagaaatctcaactccgaattgagaatagatgttttgatacttgtcctgctgtggcctgagacttggaatcatgaattataagagaccttgctgtttatctacagattagaacacacaaataaacatcagcgtaacatcctcattagcattctggtagttacatgtacttattccagagcaaaattaatatatgataagaagtggaatattttctgttgatatctagggtattatgacaacaaccttccttagaaaagaaacagtgtattatgaggacagtggatgctacaaaattatttgtcttcaaggcattgcaaacaactggaatcaattgaataaccttctcaagcacaagccaatagtgaaacgaaagtcatttatctgtaacagcaggcaagagcttcactggtacactcggaaggtggctcactaaccctgccgaagttttgctccatctgatcagggcataaatgtttcattggcccaataaccaaggtcttagagtttcgcagtgttttctctccaatacttaatagagggagcattgctgacattctgcccatggttgccaaggctgaaatcaaacgtgctttgaataatattataaaaactttgaaattaacctttgccgttggaaccaatgttcaactgtgggctctatacaaagccgcttagggtgggagggagcaaacttttcaagttggttttaggtaacagaaacagatgtctttattggatttgtctggaaaaaaagtaaggaaaatcccaacattatctgttctggtcaagaagtataaggctcagtcccgttttatttttctccttctcctttggatcctttttccttattcctgactctatacatggagaaaaagttcaagtgcatctaaaacagtaattctgggaacttgtcaacttattcccatgacgctactattgtttataaagcattttgaagattcttgtattcagagctagtgataagccacaagaggaattcagtcttgctggtgtacagctgcattttgggcccatgtatagaagagctaacatggatttcagagtctcccaggtgtttgaaatccagactctgctctcaggacctgtgaggtcttagataagttgctcaatctctttgagcctcagttttctgagtacaatggcacataccttacaggactgcggtgtggatgaattgcgatgatgtgtatgattccagctctgggtcttctttccttccttctttcttccccgccaggaggaaagcaaggcagtgcagcagagtgggaagtactgcccgtggaggccacttttgggctggagcctgctcaaggcactttagtgctgagtcatttggggcccaaggtaggggcagatagaagagaaggagggcagttatcgcctaatcacagggacagatagaagagaaggagggcagttatcgcctagtcacaggggcagatagaagagaaggacggcagttatcgcctagtcacaggggcagatagaagagaaggagggcagttatttcctagtaacagagacagatagaagagaaggacggcagttatcgcctagtcaggagtttaacaatctctatttcctttcaaacctcgtttgactgccattccagtcaaattcacaggcaattaaacttcctcctgcatctcggagcaggcctctgtatcatcatttctcctctgcaagtgtatcttcttcgggcacgtggaaaggtcttagtgcacctgcggtatttagggacttgatcctctttcctctttattgtcaaagttgtggcttgccgaagtcaggacagagtctgattatgacatgttagcaatcgtcacatctcatttttaagtaagtatacttttatgcagtttgagctctcattcatgtcatttattaatttgttcattcgttaacacattcatttgtggagcatttggcctataaaagagttgaaacccttccttaccattaagggaggagagaatacaaaatgcacagagacacatgcttggttttgtataactttgacggtttctaaaataaaataaggtctaacttggaaaatcaaaacctatcactgagatattttcataatctaaaaagtccgtttcaaaagaacttccaaaatgttttaaaaaaatgactatcctttagaataatgatgtagcattccaaagttttagtgttcaaccagcatttattaccacctgctgggtgcctgaggcaggacatttgtaatgagagccacaaacatgaattgaaaaactgctgcccataggttcacagttcctgtcaaagcatagagctccctgtagatagagccccctgtataagatgccctgtgttctgggcgagaggatacactaggtctgcagatatatctggtaggcagaacagaaaaggtgtcactgaggaggtgctatgtgagttagttgtgaaaaatgagtacgggtttatgaggcagatatgagaggcactttgttgaagttacaactcctaccaggcactcgtttgaattttctgtttcatttgctctttggaggttgcttgttggtacacttacatcttctatgccagtcttaaaagagaggagtgtgtgtgtgtgtgtgtgtgtgtgtgtgtgtgtctgtgttcagtatttttcgcagagtttctttgtgtttccaagcttactttagagctgaagcttgtcagagttctcataacaaattcgtgattgaactaaattccaacctgccgcctctggtgttggagccttacggcacctcagtgcattcatggggtgtgctctaccctctactttcgtgatttatttaaagaccaaatcatgatgaataacatttcttaggcttaaacccatagcaggggtaggaaatagttcaaaccttctgacttaaatgaacaaatacagtcttcaaaaactgttttctaatctgcatgaatgtactgaacttgttgccgccttcatttaaatgtgatgtatcaaaagtgctttgtaaactcttaaattccaatgttgatattgttatagatatactttattaaatactggataatgattttataagctacagggtgtttaactgtgaaattattctaaaatatgtagaaaaaaattggaataatcttcccattttgaacacaatgattggttttaaagttcccttgatttatgtgtttgtatactgaggattctcaattgagtgaactagtgtctttgcaatatagtaagattttggtacagtttttaatctatcaaggaaaaggctagataagtaggatctcatttgtttcatggaccattatttgaaggatgatttaagaccataggaaatactgactcaccttttctaaaaagacaactgattttcttatgcttttaagttcaaatttatcttgtctccttttgattaattaaaacaacagttatcaaaaaccttagcagaaaatattatttattgaatctgaaaagaaacaggaaatactgtgctttcttgagcctgtttcctataccccaatatcataagaatttttgttgcttctataatgttcagctgcaaattattttgcgtgatcaatcaaaatgaattacctgaattttctcctcttgttcaaaatggaaccacattcatccacctacccctagccctaggactgtttctttcattcggatagtttgtgatatccttgacttcacagcagaaagctgtgtctcccaaaccccttcactcaggtcccgtggggcctgccctctaaagtctcttcggtcttctttctttgaatgttcatggccatcttgtcgtttagactcttatccctgactgtaagagatctctcgggtcttcctgcctgtggtcatgcctaatttgtacccttcctaaaatgtgatgtgatcatgtcactgccttgcttagaagccccgcactggcttccaacacgtgcagaatcaagtgcttgctgtttaacattgtctacccagtcctccagattctggcttccagttattttctcagcctcaaaaaagcacctcgctctccaaacatatcaaatagcttgtgctctcctgcctccggttcacacctccattccttcccctctacctggatgctccttccttcatccacccccttgctgtaagctcccatggattcactggttcttgagtgttttattgcactttggacatcccgtctctcactcctggcttctgtctgtctacctgtcttgaccggccatttgcactgcctctggcttatctgcctcattctggtcgacagtgttatttattagcttcatatctactggttctctcaattatttctcagcctccccacaccaggctccttgccctgtatttataagctgctattggcttgagggtgactgtgcctttctaataaagctattttatagactgatagttacaagggtatagtcgaaaagaaatgaatctacctttgagtgtatttcaacatatctagtgatccatgaatatttcttcttattattatcattattgttatttttaaatagacgatcagggaaggcagagtctaggccaccaatgtgaacttaggctttcatctttattaagatatttgggatctctgcaagtattctgaattttaaatggcattcaatgatttgataaaataggaagtttgttttactctggactgggtagtgtttcagcaactggctactgtgtcattattactataaattcaaaatgtagaaggaacatttaccttttaaccattctcaaccttttttcttggtgcactcatgcctctgtgatctcatgaagcccaatggcattaaattccatgtatatgtgcatggtccatgaacacatatttccacctcctacctctcctctaaaatttagactcatatctaattatctgccgattatcaccacttggaagactaatagacaactcaactatcacacatccataagggaattcttgatcctccaccttcaacccctgggcccaacactcctcagtcttctccgactcagtaaatagcacctccagcgtaccggccgttaggccagaaaacttgtcctgacccctctttgtttcttacacctcatatcagcatacactgttgaactgcattaagaatctgagcttcccttgccacacccattgtgtacaacctgcttcactttaagttattgctttcatggattatgaaaatagcctcctaactcctctcccactttttctttctccctgtactttgttcttcactgagcaaccagagtaagtctttatttattttttttttttgagacagagtctcctctgtcacccaggctggagtgcagtggtgcaatctgggttcactacaacttctaactcctgggttcaagtgattctcctgcctcagcctcccaagtagctgggactacaggcatgcaccaccaagcctggctaatttttgtgtttttaatagagatggggttttgccatgttggccaggcaggtctcgaactcctgacctcaggtgatccagagtaagtcttttcaaagcataaggcaaataatgttttcatctccttaaaaccttccatggctaggaatgttttaaaccatattgtcccctgacacttctctgatgtctaggccagtcagtctcccctctattttgcaatcttcaaagacaccaggaagttgtgcttctgcctcagggcctttgcatgtgtggtccccttttcttggaatgctttctcatcaggaatcagcatggcttacttcctctcttttttatttttattttattttattattattatactttaagttttagggtacatgtacacaacatgcaggtttgttacatacgtacacacatgccatgttggtgtgctgcacccattaactcgtcatttagcattaggtatatctcctaatgctatcccagccctcttcccccaacccacaacagtccatggtgtgtgatgttcccttcctgtgtccatgtgttctcattgttcaattcccacctatgagtgagaacatgcggtgtttggttttttgtccttgcgctagtttgctgagaatgatggtttccagtttcatccatgtccctacaaaggacatgaacccttcattttttatggctgcatagtattccatggtgtatatgtgccacattttcttaatccagtctatcattgttggacattcaggttggatccaagtctttgctattgtgaatagtgttgcaataaacataagtgtgcatgtgtctttatagcagcatgatttataatcctttgtgtatatacccagtaatgggatggctgggtcaaatggtatttctagttctagatccttgagaattcgccacagtgacttctacaatggttgaactagtttacagtcccaccaacagtgtaaaagtgttcctatttctccacatcctctccagcacctgttgtttcctgactttttaatgattgccattctaactggtgtgagatggtatctcattgtggttttcatttgcatttctctgatggccagtgatgatgagcattttttcatgtgttttttggctgcataaatgtcttcttttgagaagtgtctgttcatatccttcacccactttttgatggggttgtttgtttttttcttgtcgatttgcttgagttcattgcagattctggatattagccctttgtcagatgagtaggttacaaaaattttctcccattctgcaggttgcctgttcactctgatggtagtttcttttgctgtgcagaagctctttagtttaattagatcccatttgtcaattttggcttttgttgccattgcttttggtgttttagacatgaagttcttgctcatgcctatgtcctgaatggtattgcctaggttttcttctaggttttttatggttttaggtcaaatatgtaagtctttaatccatcttgaattgatttttgtataaggtgtaaggaagagatccagtttcaggtttctacatatggctagccagttttcccagcaccatttattaaatagggaatcctttctccattgcttgtttttctcaggtttgtcaaagatcagatagttgtagatatgcatcattatttctgagggctctgttctgttccattggtctacatctctgttttggtaccagtaccatgctgctttgattactgggtactgtagcctagtagtagagtttgaagtcaggtagtgtgatgcctccagctttgttcttttggcttaggattgacttggcaatgccagctcttttttggttccaaatgaactttaaagtagtattttttcaattctgtgaagaaagtcattagtagcttgatggggatggcattgaatctataaattaccttgggcagtatggccattttcatgatattgattcttccatattactacccatgagcatggaatgttcttccatttgtttgtatcctcttttatttcattgagcagtggtttgtgtttctccttgaagagttccttcacatcccttgtaagttggattcctaggtattttattctctttgaagcaattgtgaatgggagttcactcatgatgtggctctctgtctgttattggtgtataagaatgcttgtgatttttgtacattgattttgtatgctgagactttgctgaagttgcttatcagcttaagcagattttaggctgagacgatggggttttctagatatataatcatgttgtctgcaaacagggacaatttgacttcctcttttcctaattgaataccctttatttccttttcctgcctgattgcccttgccagaacttccaacactatgtttaataggagtggtgagagagggtatccctgtcttgtgccagtttttaaagggaatgcttccagtttttgcctattcagtatgatattggctgtgggtttgtcatagatagcttttattattttcagatacatcccatcaatacctaatttattgacagtttttagcatgaaatgttgttgaattttgtcaaaggccttttctgcatctattgagataatcatgtggtttttgtctttggttctgtttctatgctggattacatttattgatttgcatatgttgaaccagcgttgcatcccagagatgaagcccacttgatcgtgatggataagctttttgatatgctgctggatttggtttgccagtattttattgaggatttttgcatcaatgttcatcaaggatattggtctaaaattctcttttttggttgtgtctctgccatgctttggtatcaggatgatgctggcctcataaaatgagttagggaggattcactctttttctattgattggaatagtttcagaaggaatggtactagctcctccttgtacctctggtagaatttggctttgaatccatctggtcctggactttttggttggtaagctattgattatcacctcaatttcagatcctgttattgttctattcagagattcaacttcttcctggtttagtcttgggaggatgtatgtgtcgaagaatttatccatttcttctagattttctagtttatttgtgtagggctgtttaaaatattctctgatggtagtttgtatttctgtgggatcacgggcgatatccccttatcattttttattgcatctatttgattcttctctcttttcttctttattagtcttgctagtggtctatcaattttattgatcttttcaaaaaaccagcttctggattcattaattttttgaatggttttttgtgtttttatttccttcagttctgctctgatcttagttatttcttgccttctgctagcttttgaatgtgtttgctcttgattttctagttcttttaattgtgatgttagggtgtcaatttttgatctttcctgctttctcttgtgggcatttagtgctataaatttccctctacacactgctttgaatgtgtcccagagatgctagtatgttgtgtctttgttctcgttggtttaaaagaacatctttatttctgctctcatttcgttatgtacccagtaatcattcaggagcatgttgttcagcttctaggtagttgagtggttttgagtgagtttcttattcctgagttctggcttgattgcatggtggtctgagagacagtttgttataatttctgttcttttacatttgctgaggaatgcttaattccaactatgtggtcaattttgtaattgatgtggtgtggtgctgaaaagaatgtatattctgttgatttgaggtggagagttttgtagatgtctattaggtctgcttggtgcagagctgacttcaattcctgggtatccttgttaactttctgtctcattgatctgtctaatgttgacagtggggtattaaaatctcccattattattgtgtgggagtctaagtccctttgtatgtcattaaggacttgctttatgaatctgggtgctcctgtattgggtgcatatatatttaggatagttagctcttcttgttgaactgatcctttaccattatgtaatggccttctttgtctcttttgatctttgttggtttaaagtctgttttatgagagactaggattgcaacccctgcctttttttgttttccatttgcttggtcgatcttcctccatccctttattttgagcctgtgtgtgtctctgcacatgagatgggtttcctgaatacagcacactgatgagtctggactctttatccaattttccagtgtgtgccttttaattggagcatttagcccatttacatttaaggttaatatagttatgtgtgaatttgatcctgtcattaagatgtcagctggcaattttgctcgttagttgatgcagtttctttgtagcctcgatgttctttacaatttggcatgtttttgcagtggctggtaccagttgttcctgtccatggttagtgcttctttaaggagctcttttcttattaatattgtttttctttttatttaaacgaggttgaccttacaaatcaaagcaatatgggagtgattttacactagcaatattatttttagttactcagatgaacaaaaagaacattcatccattgaagctgtgattaaaaaattctttatctatttaaactgaatagtatacacttgcattatcctaatacttagcaagcagagcaaaaaataaaactcactgtaaacttaggtaatataactacagattatttctcatctttgtttttgtttctttaactttttattattattatactttaagttttagggtacatgtgcacgatgtgcaggttagttacatatgtatacatgtgccatgctggtgcgctgcacccactaagtcgtcatctagcattagatatatctccgaatgctatccctcccccatccccccaaccccacaacagtccccagagtgtgatgttccccttcctgtgtccatgtgttctcattgttcaattcccacctatgaatgagaatatgcggtgtttggttttttgttcttgtgatagtttactgagaatgatgatttccaatttcatccatgtccctacaaaggacatgaactcatcattttttatggctgcatagttttccatggtgtatatgtgccacattttcttaatccagtctatcattgttggacatttgcgttggttccaagtctttgctattgtgaataatgccacaataaacatacgtgtacatgtgtctttatagcagcatgatttatagtcctttgggtatatacccaataatcagatggctgggtcaaatggtatttcttgttctagatccctgaggaatcaccacactgacttccacaattgttgaactagtttacagtcccaccaacagtgtaaaagtgttcctatttctccacatccactccagcacctgttgtttcctgactttttaatgattgccattctaactggtgtgagatggtatctcattgtggttttgatttgcatttctctgatggccagtgaaggtgagcattttttcatgtgttttttggctgcataaatgtcttctttttttagaagtgtctgttcatgtcctttgcccactttttgatggggttgtttgtttttttcttgtcgatttgtttgagttcattgtagattctggatattagccctttgtcagatgagtaggttgtgaaaattttctcccattttgtaggttgcctgttcactctgacagtagtttcttttgctgtgcagaagctctttagtttaattagatcccatttgtcaattttgtcttttgttgccattgcttttggtgttttagacatgaagtccttgcccatcccaatgtcctgaatggtaatgcctaggttttcttctagggttttatggttttaggtctaacgttcaagtctttaatccatcctgaattgatttttgtataaggtgtaaagaagggatccaatttcagctttctacatatggctagccagttttcccagcaccatttattaaatagggaatcctttccccatttcttgtttttctccggtttgtcaaagatcagatagttgtagatatgcggcgttatttctgagggctctgttctgttccattggtttatatctctgttttggtaccagtactatgctgttttggttactgtagccttgtagtatagtttgaagtcagttagtgtgatgcctccagctttgttcttttggcttaggattgacttggtgatgccggctcttttttggttccatatgaactttaaagtagttttttccaattctgtgaagaaggtcattggtagcttgatggggatggcattgcatctatcagttaccttggtcagtatggccattttcacgatattgattcttcctacccatgagcatggaatgttcttccatttgtttgtatcctcttttatttcattgagcagtggtttgtatttctccttgaagagttccttcacatcccttgtaagttggattcctaggtattttattctctttgaagtaattttgaatgggagttccctcatgatttgcctctctgtttgtctgttattggtgtataagaatgcttgtgatttttgtacattgattttgtatcctgagacattgcttaatttgcttatcagcttaaggagactttgggctgagacaatggggttttctagatatacaatcatgttgtctgcaaacagggagaatttgacttcctcttttcctatttgaataccgtttatttccttttcctgcctgattgcccttgccagaacttccaacactatgtttaataggagtggtgagagagggcatccctgtcttgtgccagttttcaaagggaatgcttccagtttttgcccattcagtgtgatattggctgtgggtttggcctagatagctcttattattttcagatacgtcccatcaatacctaatttattgagagtttttagtatgaagtgtcgttgaattttgtcaaacgccctttctgcatctattgagataatcatgtggtttttgtctttggttctgtttctatgctggattacatttattgatttgcgtatattgaaccagccttgcatcccagggatgaagcccacttgatcatggtggataagcttttttatatgctgcttgattcggtttgtcagtatgttattgaggatttttgcgtcaatgttcatcgagtatattagtttaaaattctcttttttagttgtgtctctggcaggccttggtatcaggatgatgctggcctcataaaatgagttagggaggattcactcattttctattgattggaatagtttcagaaagaatggtaccagttcctccttgtacctccggtagaattcggctgtgaatccatctggtcctggactccttttagttggtaagctattgattattgccacaactttagcccctgtttttggtctattcagagattcaacttcttcctggtttagtcttgggagagtgtatgtgtcaacgaatttatccatttcttctagattttctagtttatttgcacagagttgtttgtagtagtctctgatagtagtttgtatttctatgggattggtggtgatatcccctttatcattgtttattgtgtctatttgattcttctctttttttctttattagtcttgctagtggtctatcatttttttgatcctttcaaaaaaccggcttaaggagtcttttagggcaggcctgttggagacaaaatctctcagcatttgtctgtctgtaaagtattttatttctacttcatttatgaagcttagtttggctggatatgaaattctgggttgaaaattattttctttaagaatgttgaatattggcccccagctgtagtctgatgggcttccctttgtgggtcacccaacttttctctcaggctgcccttaacattttttcattcatttcaactttggtgaatctgacagttatgtgccttggatttgctattctctaggagtacctttgttgccttctatgtattttctgaatttgaatgttggcctgccttgctagattggggaagttctcctggataatatcctgcagagtgtttttcaatttggttccattcaacccgtcactttcaggtacaccaatcagacgtagatttggtcttttcacgtagtcccatatttcttgttggctttgttcatttctttttattcttttttgctaaacttctcttctcgcttcatttcattcctttcgtcttccatcactgataccctttcttccagttgatcacattggctactgaggcttctgcattcatcacgtagttcttgtgccttggttttcagctccatcaggtcctttaaggacttctctgcattggttattctagtgatccattcatctattttttttcaaagtttttatcttctttgccattggttcgaatctcctcctatagctcagattagtttgatcatctgaagccttattctctcaactcatcgaagtcattctccatccagctttgttccgttgctggtgaggagttttgttcatttggaggaggagaggtgctctgaattttagagtttccagtttttctgctctacttgtttcccatctttttggttttatctaacgtgggctttaatgatggtgatttacggaagggtttttggtgtggatgtcctttctgtttgttagttttccctctaaaatcaggaccctcagctgcaggtctgttggagtttactagaggtccattccagaccctgtttgcctgcatatcagcagtggtgactgcagaacagtggatattggtgaaccgcagatgctgctgcctgatcgttcctctggaagttttgtttcagaagagtaccaggctgtgtgaggtttcagtccaaccctactggggggtgcctcccagttaggctactcaggagtcagggacccacttgaggaggtagtctgtccattctcagatcacaagctgcgagctgggagaaccactaccctcttcaaagctgtcagagagggatatttaagtctgcagaggttactgctgtctttttgtttgtctgtgccctgcccccagaggtggagcctacaggggcaggcaggcctccttgagctgtggtgggctccacccagttcccgcttcctggctactttgtttacctactcatgccttagcaatggcgggtgtcccacccccagcctcgctgccaccttgcagtttgatcttcgactgacgtgctagcaatgagtgaggctccgtggacgtaggactctctgagccaggtgcaggatataatctcctggtgtgacattttttaagcccgttggaaaagcgcagtgttagggtggagtgacccgattttccagatgccatctgtcaccactttctttactaggaaagggaattccctgaccccttgcacttcacgggtgaggcaattccttgccctgcttcggctcatgcacggggtgctgcacccactgtcctgcacctactgtctggcactccccagtgagatgaacccggtacctcagttggaaatgcagaaatcacccgtcttctgtgtcactcacactgggagctgtagagcggagctgttcctattcggccttcttggctcctccccccaacattcattttaaggataaataatattctgttgtgtgtatataccatattttctttgtcagtttgactcttagaagatatctggatttctttttaaattttttactgtaaatgatgctgctataaaatttggtttgaaagtatcagtgcataagtgaataaaattttaaaatctgaacacatttctgcatgcagttcttagattgaataacggagtccaggcatggtggcttacacctgtaatcccaaatctttgggaggctgaggcaggcagatcacttaagctcaggagttcgagaccagccatagaatcatggcaaaaccccatctctactaaaaattcaaaaattagctgggcattgtggtgcatgtttgtagtcccagctattcgggagactgaggcacaaggatcacttaatacacagaggcagagtttgcagcttatgtcattgtttttaattattttggatacacctgtaattggaacatatggaactgttccacctgttgtgaaacatatggtaattctatgtagaactttctgataaactgccaatctattggtcacagtcaataaatcattttatattctcaccagccatgcaccagggtttcacttcccccacatcctggccaatacttgttctttttcatttttgttgttttggttttcatatagccactctaatagatgtaaagtggtaacttgttgtggttttgatatccatatccctcatgactggtgaggttgagcatttttctgtagactttttgacccaatgtttatacaagtcctctgcccttttataaatgcttttgttgtttcgttttgttgttgagttttagaagttctttatatatcctgcttattatattttaccttatgtacccaatcagttacatgctttgcaaatcttttctcccatttgctggttgtcttttcactctcttgttcatgctttttgtatcaaattttagaagaggtgggttttttttttctatcaaaaaacacgaacaacagagtgtttttcatatcaaaaaatcagaaaagtttcacatttaaatcaagtccaatttatctgttttttattttctggcctatgcttttggtgttacagtcaagaaaccatcacaaaatttaatgttataagatttttgcttaagctttttcccaagagtttttaaagtttaactttttgaaacttttacagtaggttcgggtatatgagtgaaggtttgttacacaggtaaacatatgtcacaggagtttgctgtatagatgatttcatcacccaggtattaagcccagtacccaatggctatcttttctgcttctttccctcctcccaccctcttacttcaaatagaccccatggtctactgttttcctcctcgtgttcatacattcttatcatttagctcccacttataagtcagaacatgtgatatttggttttctcttcctgtattagtttgctaaggacaatagtatccagttacgtctatgtttccacaaaggacataatctcattcttttttatgggtgcatagtattccataatgtatacgtagcacattttgtttatctaatctgttactgatagtatttaggttgattccatgtcattgctgttgtgaatagggctgcagtgaacatttgcatgcatgtgtctttatggtagaataattcctatttttctggaaatatacgcagtaatgggattgcaagcagaactattgaatggtagttctgcttttagctctttgaggaattgccaaactgctttccacagcagttgaactagtttacactcccaccaacagtgtataagttcccttttctctacaacctctccagcatttattgtttgactatagccattctgactagtgtgagatggcatttcattgtggttttaattttcacttctctaactatcattgatgctgagctttttctcatacacttattggcctcatgtatgtcttctttcaaaaactgtctgttcatgtctttgcccactttttaatggggttgtttttcttttgtaaatttaagttccttatagatgatagatattagacctttgttagatggatagtttacaaatattttttccaccccataggttttctgtttactctaatagttttttttctgctatgcaaaatctctttactttaattaaatcctacttgttaatttttgcttttcttgctattgcttttggtctttctatcatgaaatctttgcccgttcctatatccaggatggtattgcctggattgtctttcatggtttttatacataaagattttatatttaagtcttcaatcagtcttgagttgattttttttttttgtatatgatgtaaataaggggtccagcttcaatcttccacatattgccagccaattatttcagcatcacttattgaataaatcatctttttctcattgcttgtttttgtcagccttgtcaattatcacatgggcatagatgtgcagccttgtttctgggctctctattctgctccatttgtctatgtgtctgtttttgtatcagtattatgctgttttcgttactatagccctgtagtgtaatttgaagccaggcaacctgatgcctgcagctttgttcttttttgcttaggattgccttggctatgtgtgctcctttttggtttcatatatatatatatatttgatggaatgtcactctgtcatcaggctggagtgcagtggtgcaatctcagctcactgcaacctctgactccctggttcaatggagtctcctgcctcagcctcccgagtagctgggattacaagcgcttgccactacgcccagctattttttgtatttttagttgagaaggagtttcaccatgttggccaggatggtctcgatctcctgacctcatgatctgcacccctcggcctcccagagtgctgggattacaggcgtgagccactgcacccagcctataggaattttaaaatagttttttctagctctgtaaaaaattttattggcagtttgatggaaatagcattaaatctgtcaattgctttgtgaagtatagccattttagtcatattggatcttcctatccatgagcatggggtggttttccatttgtttgtgtcttctctgatttctttgagcagtgttttgtaattctcattgtagagctctttcacctccctggtgagctgcatttccaggtattttattatttttgtggcaattgtgaatggtatggcctttctgattttgctgtcagtgtggttatcattggtgtagagaaatgttagtgatctttgcacattgatttagtatcttgaaacttcgctgaagttgtatgttaactaaagaagctttgtagctgaaactacagggttttctagatgtagaattatgttatctacaaacagaaatagtttggctttctctcttcctatttggatgctttttgtatttctttctctagcctgattgctctggtcaggtctttcaatactatgttgaatagaaatggtgagagagggcattcttgcctggtgctggttttcaaaaaaaaaacgcccccaacttttgcccattcaacagattgttggctgtgggtttgttatacatggcttttattattttctgcatctattgggataatcgtttgttttttgtttttagttctgtttatgtgatgtattacatttattgatttgcacatgctggaccaaccttgcatcctaagaaggcagcctacttgataatgacggattacctgtttgatgcgctgctggatttggtttacaaatatttttctgagaacttttgtattgatgtttgccaagaatattggcctgaagttttcttttctttctttctttctttctttctttctttctttctttctttctttctttcttttctttctttctttctttttttttttttttgacagagtctccctctgttgcccaggctggagtgcactggcgcaatctctgcttaatgcaagctccacctcctgggttcatgccattctcctgcctcagcctcccaagtagctgggactacagttgtctgctaccaagcccggctaattttgtgtttttgttgtgtctctgccaggttttggtgtcaagatcatgctgtcctcatagaatgagttgaggaggagaccgtcctcctcaatttttggggatagtttctgtaggaattgtaccagctcttctttgtacatttggtagaatttggctgtaaatccataaagtccagggcttttattttttttattggcaagctacttattacctatataatatcagagctttttattggtccattcaggaaataattgtcttcctggcttaatcttgggagattgtgtatatctagtaatgtatctatttctttaaggttttctagtttgtgtgtataaaggtgttcatgttagtactgaccccacataaataaaaacaaccattagaaaccactaaagttgaacacttatgtctttaatctatttttatttaatttttgtacttggaatgtgataaagattcaactttactggtttaaatgtggacttgttttcccagcatttattgtggaacaaactgtccttttctttacataatgattaaggcacccttgtcaaaagacaatcaataatttatgcaagggttttttggattatctattttatttatttgatatctacaattgttcttatgccactagcaaactgttatagtagctttgtatgttttcaaatttaaaattgtgaaatatctaattttgttcttcttttcaagattattctgtacgttcagaggattttcaaatttcatatgaagttttaaatgaattattttgtttttgcaaaagaaaagttggaaaaattaaacattgggattacagtacatctgtacactactttgggtggtagtattttcatcttaacttcattaagtcttccggtacaggaatatggaatttgttgctagttatttaagtcctttttagtttttttcataaatattctgatcctgtttttttattgtacaaaatatgtaccttcttattaaatttattgctaagaattgtattattttaatgttgttgcaaacaattgttttattaatttactgtcaaattgttcattgttggtatatggaaatgcactttatgtttctgtgttgtaaaaataattatttcatctccaaatctagattagcaattcattcagaataagtatgcagtacaaattggtagtcatttaactttttccaataagctaaccaattacactgtgtctaaatatgtaaaaatgttgaattgtgttagattttcacttaccctcacctgtcatttatcagtcagaattacattactgcacacatagaactttcatttctggggccgggcatggtggctcatgcctatattcctagcactttgtgaggccaaggcaggccgactacctgagatcaggagttcgagaccagcctgaccaacatggtaaaaccctgcctctactaaaaatagaaaaataaactgagtgtggccgtgggagcctgtcctccagctactttggaggctgacacaggataatcacttgaacaatcccacaacacaaaacaacaaaagttagttttcatgtcaaaaatcttcaatggatgtttttcatcacaggattgtttagtgcaacattttatggaaaagatgcatgctactgagatgtagttctccaaaagtatcttagagtttgttgttttgttatgtcttacctcacacacctgtcctgttccaggctatttttcaaagatttttgtatacaaataacctggaaaaagggtagtagtttttctcttcaggtgaatggcagataaattactcaatcaatataataaagacaatttttctctgtgaggcaaagtttggacaggtttgcatgtaacctactttaagaagattaaggtttcttagtcttgagcctgctcagctgtgacacaaatcttccccatgtgcaatgtccatctgagccttttgaaatccctctaaaaaatgtagtatggacaaggagaactaatacaaatatgaggcttttgcctccaggtagacagtaaatagtaggtatttttttcatacttcagtgtctcatgccttctaccagcatccatggaaatggaaggttaataggtttgtttacaaataggatgaaatcttagatccttcacaattatttaattttggagatgacaatgggatgctgagataaacacaactttctgaaaggggaaaatacacaaatacttgaagagcttgcaacggatatgaaaatttcccctaggactaacagcaacttctctcagccaagtggttagtttggtgaaacaagggatcaacactctgctgtctgctaatgagactgatccttgagaggattataacaatgagactgagagctttgcatgttcatttttctcctgctggaaagatcaaggacctcttaaagctaatgttgaggcttggatgagtccaaaacactagaagttcacctctgtgagatgaatgcacacttcacaaagaagtttctcagaatgcatctgtctagtttttatgtgaagatatttccttttccaccataggaggcaaacttctccaaatatacacttgcagatgctacaaaaagagtgtttcaaaactactcaatgaaaagaaaggttcaactctgtgagatgagtgcacacatcacagagaagtttctcagaatgcttctgtctagtttttatgtgaataggtttgttttacaccataggcctctaagcgcttcaaatatccacttgcagattcaccaaaaacagtgtttcaaaactgttcaatcaaaggaaaggtttaaatctgtgagatgaatgcacacatcacaaagaagtttcttaaaatgcatctgtctagttttgatgcaaagatatttgcttttccaccaaaggcctaaaagcactccaaatattcacttgcagattttacataaagagtgtttcaaaactgctcaatcaaaagaaaggttcaactctgtgagatgaatgcacaaatcacagagaaatttctcagaatgcttctgtctagtttatatgtgaagatatttccttttacaccatagacctcaaaccgcttcaaatatccatttacagatactacaaaaagagtgtttcaaaactgctcaatcaaaagaaaggttcaactctgtcacatgaacgtgcacatcacaaagaagtttttcataattcttccgtctagtttttatgtgaagatacttccttttacaccgtaggcagcaaagcgctccaaataccctcctgcagattctacaaaatgagtgtttcaacactactcaatcaaaagaaagttccactctgtgagatgaatgcacacatcacaaagaaatttctcagaatgcttctgtgtagtttttatgtgatgatatttccttttccacaataggccttaaagcactccaaatatccacttgcagattctacaaaggagtgtgtcaaaactgtgcaatcaaaagaaagatttaactctgtgagatgaatgcacacatcaccacgaactttctcagaatgcttctgtctagtttttatgtgaagatatttccatttccactgtgggccacaaagggctccaaatatccacttgcagattctacaaaaagagtgtttcaaaactgctaaatcaaaagaaagattctactctgtgagttgaatgcacacatcaaagaagtttctcagagtgcttccatcaagtttttatgtggagatatttccttttccaccataggcccctaagcgctccaaatatccgcttgcaaattctacaaaaagaatgtttgaaaactgctgaatcaaaagaaaggttcaccactgtaagatgaatgtgcacctcacaaagaagtttctcagaaagattctgtctagtttttatgtgaagatatatccttttgcaccgtagacctcaaaacgatccatatatccatttgcagattctacaaaaagagtgtttcaaaactgctcaatcaaaagaaaggttaagttctgtgagatgaatgcacacattacaaagaagtttctcagaatgctgctgtctagtttttatgtgaagatgtttgattttccaccatacgcctcaaagtgctctaaatatccacttgcagattatacaaaaagagtgtttcaaaacagctcaatcaaaagaaatgttcaactctgtgagatgaatgcacacatcacaaagaagtttctcagattgcttctgtctagtttttatgtgaagatatttattttccaccataggccgcaaagcgctccaaatatccacttgcagattctacaaaaagagtgtttcaaaaggctaaatgaaaagaaaggttcaactctgtgatgtatatgcacacatcacaaagaagtttctcagaatgcttttgtctactatttatgtgaaggtatttccttttccaaaatatgccccaaagcactcctattatccacaggcagattctacaaaaagagtgtctcaaaattgctcaatcaaaagaaaatttcaactctgtgagatgaatgcaaacatcacaaagaagtttctcagaatgcttctgtctagtttttaagtgaagatatttccttttcctccataggcgtcaaagtgctccaaatatcctctagcagattctacaaaaagagtgtttcaaaactgcttaatcaaaagaaatgttcaaatctgtgagaggaatgcacacatcacaaataagtttctcagaatgtttcctctagtttttatgtgaagatatttccttttccaccatagtcctcaaagcgctccaaatatccactggccgattctccaaaaagagcatttcaaaactgctcaatcaaaagaaattttcaaatctgtgagatgaatgtgcacatcacaaagaagtttctcagaatgcttctgtgtagcttttatgtgaagatattccattttccacaataggcctcaagtgtctccaaaagtccacttgcagattctacaaaaagagagtttcaaaactgctcagtcaaaagaaaggttaaactctctctgatgaatgcacacatcacaaagaagtttctcagaatgcttccatctagtttttatgtggagatatttccttttccgccatcggcccctaagcactccaaatatccacttatagattcttcaaaaagcgtgtttcaaaactgctgaatcaaaagaaaggttcaactctgtgagttgaatgcacatatcagagaaaagtttctcagaatgcttctatctagtttatatgtgaaggtatttccttttccatcatactcatcaaagcgttccaaatattcccttgcacattctacaaaaagagtgtatcaaatcttctcagtgaaaagaatggttcaatttggtgagataaatgaacacatcatgaggaagtttcgcagaatgcttctgtctagtttttctgtgaaaatattgcctttactaccataggacacaatcgctccaaatatctactttcagattctacaaaaagggtgtttcaatactgctcgatgaaaggaaagattcaacctggtgagatgaacgcacacatcacaaagaagtttctcagaaggcttctgtctagtttttatgtgaagatatttccttttacaccataggccacaattcgctccaaatatccacttgcagattcatcaaaaagactgtttcaaaaccctcaatcaaaagaaagtttcaacactgtgagatgaatgcacacatcacaaagaagtttctcagagtgcttctgtctagtttttatgtgaagatatttccttttccaccagagaccacaaatcgcttcaaatacccacttgcatatacaacaaaaagagtgtttaaaaactgctcaatcaaaagaaaggttcaactctgtgagatgaaggcacttatcacagagaagtttctcagaatgcttctgtctagtttatatgtgaagatatttccttttccacgatagacctcaaaccgcttcaaatatccatttacagatactacaaaaagagtgtttcaaaactgttcaatcaaaagaaaggttcaaatctgtgagttgaatgcacagatcgccaaaaatttctcagaatgcttctgtctagtttttatgtgaagatagttccttttccacaataggccccaaaacgctccaaatatccccttgcagatactacaaaaagatgctttaaaaactgctcaatcttcttaatccagtctatacacaccatggaacactatgaagccataaaaagtgatgagttcataacctttttagggacatggatgaaattggaagtcatcattctcagtaaactatcgcaagaacaaaaaaccaaacaccgcatattctcactcataggtgggaattgaacaatgagatcacatggacacaggaaggggaacatcacactctggggactgttgtggggtgggaggaggggggagggatagcattgggatatatacctaatgctagatgacaagttagtgggtgcagcacaccagcatggcacatgtatacatatgtaactaacctgcacaatgtgcacatgtaccctaaaacttaaagtataataataataataactgctcaatcaaaagaaatgttcaactttttgagatgaacacacacatcacaaagaagtttctcagcatgcttctattttttatgtgaagatatttccttttccaaaataggccagaaaggtctgcaaatatccacttgcagattttacaaaaagagagaatcaaaacttctcaatcaaaagataggttcagctgtgtgagtctaatgcagacatcacaaaaaagtttctgagaatgcttctgtgtagtttttatgtgaagatatttccttttccaccataggcctcaaagcgctccaaatatccacttgcagattctacaaaagagtgtgtccaaactggtcaatcaaaagaaaggatcaactctctgagatgaatgcacacatcacaaagaagtttctcagaatgcttctgtctagtttttatgtgaagatattttcttttccacaacaggccacaaagcactctaaatatccacttgcagattctacaaaaagacggtttcaaaactgctcaatcaaaagaaaggttcaactctgtgagatgaatgtacacattacaaagacgtttctcagaatgcttcttcatagtttttatgtgaggatatttccttttccaccataggtctaaatgtgctccaaatatccacttgcagattctacaaaaagagtgattaaaaactgctcaatcaaaggatagattcaactcggtgagatgaatgcacacatcccaaataagtttctcagaatgcttctgtgtagtttctgtgtgaagatatttccttttccaccaaagatctcaaagcgctaaaaatatccccttggagattctacaaaaagaatgtttccaaactgctcaataaaaagaaaggttcaactctgtgtgatgaatgcacacgtcacaaagtagtttctcacaatgcttctttgtagtttttatgtgaagatatttccttttccacaataggcctcaaagtgctcgaaacattgacttgcacattctacaaaacgagtgtttcaaaactgctcaatcaaaagaaaggttcagctttgtgagatgaatgcacacaacacaaagaagtttctcagaattattttgtgtggtttttatgtgaagatatttcctttttcacatttggccacacaacgcaccaaatatccacttacagaatctgcaaagacagagtttcaaaactgctctataaaaagataggctcaacccggtgacttgaatgcacacatctcaaagaggtgtctcagaatgcttctgcgtacttttttgtaaagatatttccttttacaccattcaccacaaagtgctccaaacatccacctgcagatgttacaaaaagagtgtttccaaactgatcaatgaaaagaaaggttcaactctatgagacgaattcacacatcatgaagaagtttctcacaatacttttgtgtagtttttatgtgaagatatttccttttccaaaataggccttaaaggactccaaatatccccttgcagattctacaaaaagggcgtttcaaaagtgctcaatcaaaagagaggttcaactctttgaggggaatgcacgcatagcaaagaagtttctcagaatgcttctgtgtagtttttatgtgaagatatttccttttccacagtaggcctcaaagggctacaaatatacacttgcagattctacaaaaagagtgtttcaaaactgttcaatcaaaagaaaggttcaagtctgtgagttgaatgcacacatcataaagaagtttctcagaatgcttatgtgcagtttttatgtgaagatatttccttttccacaatttgcctcaaagcactccaaatatccacctgcagattctgtaaagattgtttccaaactgctcaaagaaaagaaaggttcaacttcgtgagattaatggactcatcacaaagtagtttatcagaatgcttctgtgtcatttttatgtgaagatattttcttttccacagtaggcctcaaagtgtttcaaatatccacttgcttattctattaaaagagagtttccaaactgttcagtctaaagaaaggttcaactctgcgagatgaatgtgcacatcacaaagaagtttctcagagttcttctgtgtagtttttatgtgaaggtatttccttttacacagtaggccacaaagggctccaaatattcacctgcagattctccaaaaagagagtttctaaaatcctctaccaatagataggtacaactctgtgagttgaatgcacacatcacaaagaagtttctcagaatgcttctgtgtagtttttatgtgaagatatttcaatttccacaatagtcctcaaagcgctctaaatatccacttttagattctactaaagagtgttttcaaacggctcaatcaaaagaatggtaaaacactgtgagatgaatgcaaaaatcacaaagaagtttctcagaatgcttctgtatagttttcatatgaagatatttccttttccacaatgggcctcaaagcgctctgtgagatgaatgcacacgtcacaagacatttcccagaatgattctgtgtacttttcctgtgaagatacttccttttccacaatagtcctcaaagctttccaaatatccacttgcagattctacaaaaagtgtgtttcaaaagtgctcaatcaaaagaaatgttctactctgtgagatgaattcaacatcaccaagaagtttctcagaatgcttccgtgtagtttttatgtgaagatatttccttttacaccatagacctcaaatcgctccaactatccacttgcagattctacaaaaagagtgtttccaaactgctcattcaaaagaaaacttcaactctgtgggatgagtaaacacctcgcaaagaagtttcacagaatgattctgtgtagtttttatgtgaagatatttccttttccacaataggcctcaaagcacccctaatatccacttgcagattctacaaaaagagtgtttcaaaactgctcaatcaaaaaaagtttcaattctttgagttgaaagcacacatcacaaagaactttctaagaatgcttctgtatagtttttatgtgaagatatttcattttccacaataggcctcaaagagctccaaatgtccacttctagtcactacaaaaagagagtttccaaagtgctaatgaaaagaagggttcaattctgtgagatgaatgcatacatcacaaagaagtttctcagaatgcttctgattactttttatgtgaagatatttccttttccacaatagacctcaaagggctccaaatatccactttcagattgtactagaagagtgtttcaaaaatgctcaatcaaaagaaagtttcaactctgtgaggtgaatgcacacatcacaagaaatttctcagaatgcttctgtgtaatttttatgtgaacatacttccctttccgcaatagtcaacaaagccctgcaaatatacacttgcacattctagaaaaagagtgtttcaaaactgctcaatcaaaagaatgtttcaaccctgtgaggtgaatgcacacatcacaaagaagtttctcagaatgcttccgagtagtttttatgtgaagatatttccttttcaaccgtaggcctaaaagcactccaactattcacttgcagattctacaaaaagagtgtttccaaactgctcaatcaaaagaaaacttcaactccatgaggtgagtaaacacaatgaaaataagtttcacagaatgattctccatagtttttatgtgaagttatttccttttccaccacaagccgcaaatgtctttaaatatccacttccaggttctacaaaaagagatattcaaaactgcttaatcaaaaggtaggttcgactctgtgagttgaatgcatacatcacaaagtagtttctcagaacgcttctgtgtagtttttatgtgaagatatttccttttacaccataggcctcaaagcgctccaaatatccacctggagattccaagaaaagagaaattcaaaactgcttatcaaaagataggttcaactccgagagttgaatgcacacatcacaaataagtttctaagaatgcttctgtgtattttttatgtgcagaaattaccttttcctcagtacaccttacagagctgcaaatatctacctgcagatcgcactaaaagagtatttcaaaactgcacaatcaaaagaaaggttcacctctgtgaaatgaattcacacatcacaaaaagtatctcagactgttcctgtgtagtttttatgtgaagatacttccttttacacaatagctgtcaaacgctccaaatatccactagaagattctacaaaaagagtatttcaaaactgcttaaacaaaagaatgcttcaactctgtcagatgaatgcacacatcacaaagaagtttctctgaatgcttctgtgtagtttttatgtgaagatatttccttttccactgtaggctgcaaaaggctccaaatatccacatggagattctacaaaaagaatgtttccaaactggtcaatcaaaagaaagatacaactctgtgagttgaatgcacacatcacaaagaagtttctcagaattctactgtgtagtttctatgtgtagatattttcttttccacaaaaggcctcaaagcgttccaattatccacttgcagattctacaaaaagattgttacaaaactgctcaatgaaaagaacggttcaactcagtgggaggaatgcacacatcacaaagaagtttctcagaatgtttatgtgtaatttttatgtgaagatagttccttttctgcaataggcctcaaagcgctccaaatatctacttgcagattctacaaaaagtgtttttcaaaactgctcaatcaaagcaaaagttcaactctgagatgaatgcccacatcacaaagaagtttctcagaatgcttctgtgtagttttcatgtgaagataattcgttttccacaataggcctcaaagcaccccaaatatccattgcatattctactaaaagcatgttataaaactgctgaatcaaaagaaaggttcaactctgtgagatgaatgcacaaatcaaaataaagtatctcagaatgattctgtgtagtttttgatgaagatacttccttttccacaaaagaccttaaagggctcctaatatccacttgcagattctacaaaaagagagattcaaaactgctcaatcaaaagatagattcaactgtgtgagttgaatgcacacatcacaaagaagtttctcagaatgcttctgtgcagtttttatgtgaagatacatgcttttccacagtaggcctcgaagcgcaccaaatatccacttgtagattctacaaaaagagtgtttccaaactgctcaatcaaaagcaagtttcaactctgtgagatgaatgcacataacacaaagtagtttctcagaatgcttctgtgtattttttgtgtgaagatatttccttttccacaataggcctcaaagccccccaaatatccacttgaagattctacaaaaagagggttttaaaactgctcaatcaaaagaaagtttcaactctgtgagatgtatgcacacatcacaaaaaagtttctcagaatccttctgtgtagtttttctgtgaagatatttccttttccacaatagccctcaaagcgctccaaatatccacttgaagattctgcaaaaagagtatttcaaaactgcttaatcaaaagaatgcttcaactccgtgtgatgaatgcacatatcacaaagaagtttctcagaatgctactgtgtagtttttacgtgaagatatttccttttccaccataggctgctacgtggtccaaatatccacctgcagattttacaaaaggagagtttcaaaacttctcaatgaaaagataggttcaactatctgagttgaatgcacacatcacaaagaagtttcccataatgcttctgtgtagtttttatgtaaagatatttcctttctcaaataggcctcaaagtcctgtaaatatgcacttccggattctacaaaagagtgtttcaaagctgctcaattgaaggaaaatttcaactctttgtgatgtatgcactcatcacaaagtagtttctgtgaatgcttctgtgtagtttttatgtgaagatatttcctttttcacaactccaaatatccacttccagattctacaaaaagagagtttcaaaactgctcaatcaagagataggttcaaccctgtgagttgaatgcacacatcagaaaaaagtttctgaaaatgcttctgtgtagtttttatgtgaaggtatttccttttccaacataggcctcaaagtgatcaaattatccacctgaagattctacaaaaagtgtgtttccaaactgttcaatgaaaagaaaggttcaaccctgtgagatgaatgcacacatcacaaggaagtttctcagaatcgttctgtgtagtttttatgtgaagatgtttccctttacacgataggcctcaaagggctccaaatatccagttgaagattatacaaaaagagtgtgtccaaactgctgaatcaaaagaaaagttcagctctgtgagataaaagtacacatcacaaagaagtttctcagaatgcttctgtgtagtttttatgtgaagatgtttccttttccaccataggccgccaaggtctccaagtatccactttcagattctacaaaaagagagattcaaaagtgctcaatcaaaagatagattcaaaactgtgagttaaatgcacacataacaatgaagtttctcagaatacttctgtgtagtttttatgtgaagatatttccttttacacaatacgcctcaaagcactaaaaatatccacttgcagattctacaaaaatagtgttttaaaactgctcaatcaaaagaaagtttcaactctgtgaggtgaatgcccacatcacaaagaagtttcttagattgtttatgtgtagtttttatgtgaagatatttacttttccactgtcggcctcaaagtgctccaaatatcaacttatagactcgcaaaaacagtgtttcaaaactgcttaatgaaaaactaggttcatctctgtgagatgaaggcacacatcacaaagaagtttctcagaatgcttctgtgtagtttttatgggaagataattcctgttccaaaataggcctcaaagccctccagatatccacttgcagactctacaaaaagtgtgtttcataactgttcagtcaaagaaattttcaactctgtgtggtgaatggactcatcacaaagtagtttctcagaatgcttctgtgtagtttttttgggaagatatttcctttatcacaagaggccacaaagggctcctaatatccacttgcagattctacaaaaagagagattcaaaactgctcaatcaaaagataggttcagctctgtgtgattaatgcactcatcacaaagaagtttctcagaatgcttctgtgcagtttttatgtgaagatacatgcttttccacaatagtcctcaaagtgctccaaatttccacttgcagattgtataaaaagattgtttcaaaagtgctcaatcataagataggttcaactctgtaagatgaatgcacacatcaaaaagaagtttctcagaatgcttctatgtagtttttacttgaagatatttccttttccaccttatgctgtaaagggctccaaatatccacttgtagattcttcaaaaagagagattcaaaactgctcaatcaaaagatagatttaactacgtgagttgaatgcacatatcttaaagatgtgtctcagaatgcttctgtcagaatgcttctgtgcagtttttattggaagatatttccttttcctccataggctgcgaagggctacatatatccacttgcagattctagaaacagagagattcaaaactgctcaatcaaaggataggttcaactccataagatgaatgcacacatcacaaagaactttctcagaatgcttttgcatagtttttatgtgaagatatttccttttccacaataggcatcaaagcgctccatatatccacttgcagattctacaaaaagagtttttcaaaactgcactgtccaaagaaaagttcaactctgtgagatgaatgcccacatcactaagaagtttctcagaaggcttctgtgaattttttatgtgaagatatttgcttttccaaagtagaccccaaagtgctccaaatatgcacttgcagattcttcaacaagactgtttcaaaactgctcaatcaaaagaagtgttcaactctgtttgatgaatgcactcatcacaaagatgtttctcagaatgcttctgtgaagtttttatgtgaagatatttccttttccaccataggccacaaagggctcaaaatatccacttgcagattttacagaaagagagattcaaaactgctcaatcagaaggtatgttgaaatctgtgagacgaatgcactcatcacaaagaagtttctcagtatgcttctgtgtagtttttatgtgaagatatatccttttccacaaaaagcctcaaaacgctccaaatacccacttgcagattctacaaagagagtgtttcaaaacagctaaatcataaggtaggttcaattctgtgagatgaatgcacacatcccaaagaagtttctcagaatgcttctgtgtagtttttatgttaagatatttccttttccacaataggcttgaaagcgctccaattatccactttcagattctacaaaaagaatgtttcagaactgatcaatcataagataggttcaactctgcgagatgaatgcacacatcacaaagatatttatcagaaggattctgtgtagtttttatccgaagatacttgcttttccacagatggcctcaaagcactccaaatatccacttgcagattcaataaaaacagtgtttcaaaactgctgaatcaaaagaaaggttcaactctgtgagatgaatgcacgcatcacaaagaagtttctcagaatgcttctgtgtagtttttaattgaaggtatttccttttcctccatgggccgcaaagggctccaaatatccacttgcagcttctacaaaaagagagattcaaaactgctcaatcaaaagataagttcacctctgtgagtctaatgcacacatcacaaagtagtttctcagaatgcttctgtgtagtttttatgtgtagatatttcgttttccacaatagacctcaaagctttccaaatatccacttgcagattctacaaaaagagggttgcaaaactgctcattcaacggaaatttcaactcttttagatgaatgcacacatcacaaagaaattactcagaatgcttctgtgtagtttttatgtgaagatatttgcttttccatagtaggcctcaaagtgctccaatatccacttgtaggttttacgaaaacagtgtttcaaaactgtccaatcaaaggaaagtatcaactctgtgagatgaatgcacacatcatgaagaagtttctcagaatacttccatataattttaatgtgaagacatttgcctttccaccggaggcctcaaagcactccaaatatccacttgcagattctacaaagcgaatgtttcaaatctgctcaatcataagataggttcaactctgtgatatgaaggcacacatcacgaagaagtttctcagtatgcgtctctgcagtgtttactagaagatatttccttatcgtccataggccacaaagggctccaaatatccacttgcagattctagaaaaacagagattcaaagctgctcaatcaaaagataggttcaagtctgcgagttgaatgcacacatcacaaagaagtttctcagaatgcttctgtgtagtttttatgtgaagatatttcattttccacaataggcctcaaagcactccaaatatccacttgcagattctacaaaaagagttttcaaaacttctcaatcaaaacgaaagttcaactctgtgagatgaatgcacacttcacacagaagtttctcaaaatgcttctgcgtagtttctatttggagatatttccttttccaatgtaggccacaaagggctccaaatatccacttgcagattctacaaaaaaagtgtttcaaaagtgcacaatcaaaagaaaggtgcaactctgtgagatgaatgcacacatcacaaagaagtttcacagaattcttctgtgtagtttttatgtgaagatatttccttttccaaaacaggcctgaaagccctccaattatcaactttcagattctacaaagagagtgtttcaaaactgctcaatcataagataggttcaaatctatgagatgaatgcacacatcacacagaagtttcttagaattcttctgtgtagtatttatttgaagatatttccttttcctctgtaggccgcaaagagcttcaaatatccacttgcagattatacaaaaagagaaattcaaaactgctcaatcaaaagataggttcaactcagtgatttgaatgcacacatcacaaactagtttctttgaatgcttctgtgtagtttttatgtaaagatatgtccttttccataataggcctaaaagggctccaaatatccagttgcagactctacaaaaagagagattcaaaactgctcaatcaaaacaaactttcaactctgtgggatgaatgcacacatcacaaagaagtttctcagaatgcgtctatgtagtttttacatgaagatatttgcttttccacagttgacctcaaagcggcctatacagattctatacaaacagtgtttcaaaactgctcaatcaaaaggaaggttcaactctgctcaatgaatacccacatcacaaagtagtttctcagaatgcttctagtagtttttatgtgaagatatttccttttacacaataagtcacaacgcgctcaaaatatccacctgaagtttctgcaaagagagtgtttcaaaactgctcaataataagatagattcatctgtgtgagatgaatgcacacatcacaaataagtttctcagaatgcttctgtgtagtttttatttgaagatatttcctttacctccataggccacaaagggctccaaatatccacttccagattctacaagaagagagattaaaaacttcacaatcaaaagataggttcaactctgtgagttgaatgcacacatcacaaagtagtttctcaggaagcttctgtgtattttttttgttaagatatttccttttcaacaataggactcaaaacactgcaaatatccactttcatatcatacaaaaagagtgtttcaaaactgctcaatcaaaataaagtttcaactctgtgagatgaatgcagacatcacaaagaagtatctcagaatgcttctgtgtagtttttatgtaaagatatttgcttttccacagtaggactcaaagcgctccaaatttccattgcagatactacaaaaacagggtttcaaaagtgctcaatcaaaagaaagtttcaactctctgagatgaatgcacacatcacaaagaagtttctgtgaatgcttctgtgtaatttctatgtgaagacatttctttgccacaataggcctccaagctctccaagtattcacttgcagattttacaaagagagtttttcaaaactgctcaatcataagataggttcaactctgtgagatgaatgcatacagcacaacgaagtttctcagaatgattctgtgtagtttttatgtgaacatatttgattttccacagtaggcctcaaagcgctccaaatatccccttgcagattctacaaaaacagtgttttagaactgctgaaatatacgttaggttcaactctgtgagatgaatgcgcgcatcacaaagaagtttctcagaatgcttctgtgtagttttcatgtgaagatatttccttttcctccataggatgcaaagggctccaaatatccaattgctgattctacaaaaagagagattcaaaactgctcaatcaaaagattagttcaacaatgtgagttgaatgcacacatcacaaagatgtttctcagaatgcttctgtgtagtttttatgtgaagatgtttccttttccactataggcctcaaagcgctcaagtatccacgtgtagattctacaaaaagagtgtttcaaaactgttcaatcaaaagaaaggttcaattctgtgagatgaatgcatacatcacaaagaattttctcagaatgattctgcgtagtttatatttgaagatatttccttttccaacgtacgccttaaagagctccaaatatccacttgaagattctacaaaaaagagattcaaaactgctcaataaaaagatatgttcaactctatgagttgaatgcactcatcacaaagaagtttatcagaatacttctgagtagttgttatgtgaagatatttccttttctaccatatgccgcaaagggctcgaaatatccacctgcacattctacaaaaagtgagattcaaaactgctcaatcagaagacgggttcaactctgtgtgttgaatgcacacatcacaaagaagtttctcagaatgcttctgtgtagtttttatgtgaagatatttcctttaccataataggcctcaaagcgctccaaatatctacttgcaatttctaaaaaaagagtgtttaaaaactgctcaatcaaaagaaaggttcaaatctctgagatgaatgtacacgtcacacagaagtttctgagaatgcttctgtgtagtttttattggaagatatttccttttcctccatatgtcagaaagggctccaaatgtccacttgcagattctacaaaaagacagattcaaaactgctcaatgaaaagagaggttcaacactctgagttgaatacacacatcaataataagtttctcagaatgcttctgtatagtatttatgtgaagatatttccttttccacaataagcctcaaagcactccaaatatccacttgcagatactagaaagagagtgtttcaaaactgctcaatcgtaagataggttcaaccctgtgagatgaatgcacacatcacaaagaagtttttcagaatgcttctgtgtagtttttatgtgaagatacttgcttttccgcagtgagcctcaaaaccctgcaaatactgacttgcagattctacaagaacagtgtttgaaaactgctgaatcaaaagaaagttggaatttcgtgtgatgaatgcatacatcacaaagaagtttctcagaatgcttctgtgtagtttttatgtgaagctatttctttgccatagtaggcctcaaagcactccaagtatccacttgcagattctacaaagagagtgtttcaaaactgcttaatcataagataggttcaactctgtgagacgaaaacaaacatcacaaagaagtttctcagaatacctctgtgtagtttttatttgaaggtatttccttttccttcgtaggtggcatagggctccaattatccacttgcagattctacaaaaaaagagatgcaaaactgcttaatcaaaagataggttcaactctgtgagttgaatgcaaacatcacaaagatgtgtctcagaatgcttctctgtagtttttatgtgaacatatttccttttccacaataggcctcaaagtgctccaaatatccacttgcagatactacaaaaagagtgtttcaaaactgctcaatgaaaagaaaggttcaactctgtgagatgaatgcacacatcacaaagaaatttctcaatatgcttctgtgcagtttttatgtgaacatatatgcttttccaccgtaggcctccaagggctccatatatccacttgcagattctacaaaaacagtgtttcaaaactgctcaatcaaaataaatgttgaacactgtgagattaatccacacatcacaaagaagtttctcagaatgtttctgtgtagtttttatgtgaagatatttcctttcccacagtagacctcaaagcactccaaatatccacttgcagattctagaaagagagtgtttcaacactgctcaatcataagataggttcaaccctgtgagctgaatgcacgcatcacaaagaagtgtctcagaattcttctgactagtttttatatgaagatatttccttttccaccataggccttaaagcgctacaaatttacacttgcatatcctacaaaaagtgtatttcctaactggtccatcaaaagaatggttcaaatctgggagatgaatgcacacataacaaagaagtctttcagattgcttctgtctagattttatgtgatgatatttccttttctaccataggccacaaagcattccaaatgtccacttgcagatactacaaaaagagtgtttccaaactgcttcatcaaaagaaatgttcaactctgtgagatgaacacaatcatcacaaagaagtttgtcagaattcttctgtctagtttttatatgaagatacttccttttccaccttaggcctaaaggtgctcacaatgtccacttgcagattctacaaaaagagtatttcaaaactgttccaccaaaagaaagattcaactctgagagatgaatgcacacatcacaaagaagtttctcagaatgtttctgcgtagtttttatgtgaagatatttccttttgcactacaggcctcaaagcactctaaatgtccacttgcagattctacaaaagagagtttcaaaactactcaatgaaaataaaggtttaactctttgagatgaatgcacacatcacaaagaattttctgagattgcttttgtctagattttaagtgaagatacttccttttctacaataggccgcaaagcgatccaaatgtccatttgtagattctacaaaaagagtgtttccaaactgctgattcaaatgaaaggttcaactttgtgagaaaggcataacacatcaaaaaaagtttcttagaattattctgtctagtttttatgtgaagatatgtccttttccaccaaaggcctcaaaaagctccaaatgtccacttgcagattctacaaaaagagagtttcaaaactgcacaatcaaaagaaagtgttaactctgagatgaacgcacacatcacaaagaagtttctcagattgcttctgtctggattttatgtgaaggtatttccttttctacaataggctgcaaagcgctccaaatatccacttgcagattctacaaaaaaagtgtttccaaactgctcaatcaaaagaaaatttcaattctgtgagatgaacacacacaacacaaagaagtttctcagaattcctctgtctagtttttatgtgaagatatttccttttccaccataggactcaaaactctgcaaatgtccacatgcagattctacaaaaagaatgtttccaacctgctcaatcgaaagaaagttcaactctgtgagatgaacgcacacatcacagagtaatttgtcagaattcttctgtgtagtttctatttgaagatattaccttttccaccataggcctcaaagtgctccaaatatccactttcagattctgcaaaaagagagtttcagaactgctctatcaaaagaaaggttcaactctgtgagatggatgcacacatcccaaagaaatttctcagattgcttttgtctagatttcatgtgaagatatttccttttataccataggccagaaagcactccaaatgtccatttgcagattctacaaaaagacagtttccaaagtgttcaatcaaaagaaaagttcaactctgtaagatgaacgcacacatcacaaagaagtttctcagatcgcttctgtatagattttatgtgaagatatttccttttttaccataggccacaaggtgctacaaatgtccacttgcagatactacaaaaagagcgtttaaaaattgctcaatcaaaagaaaggttcaactctgtgagaataacgcacacatcacaaagaagtttctcataattcttctgtctagtttttatgtgaagatatttccttttccacaataggcgttaaagagctccaaatgtccacttgcagattctacaaaaagagactttaaaaactgctcaaccaaaacaaaggttaaactctgtgaatgaatgcacacaacacaaagaagtttctcagattgcttctgtctagattttatgtgaagatattttcttttctaccataagttgcaaatctctccaaatttctacttgtagattctacaaaaagagtgtgtccaaactgctcaataaaaaggaaggttcaactctgtgagatgaatgcacacatcacaaagaagtttctcagaattcttctgtctagtttttatgtgaggatatttccttttccagcatcagccacaaagcgctccaaatgtccacttgcagattctacaaaaagagagtttcaatactgctcaagcaacagaaagttttaactctgtaagatgaacgcacacatcacgaagaagtttctcagattgcttttgtctagattttatgtgaagatattaccttttctaccatagaccgcaaagtgctccaaatgtccatttgcagattctacaaaaacattgattccaaactgctctatcaaaagaacggttcaaatctgtgagatgaacgcacacatcaacaagcagtttatcagaattcttctctctagtttttatgtgaagatatttccttttccaccataggcctcaaagcgctccaaatgtccacttgcagattctacaaaaagagagtttccaaactgttcaatcaaaagaaagtttcaactctttgagatgaacgcacacatcacaaagaagtttctcggaattcttctgcctagtttctatgtgaagacatttcctttaccaccatattcctcaaagagctccaaatgtccacttgtagattttaaaaaaagagtttcataaatgctcaatcaaaagaaagttttaactctgtgagatgaatgctgacatcacaaagaagtttctcagattgcttctgtctagattttatgttaagatatttccttttctactgaagactgcaaagcgcacctaatgcccacttgcagattctgcaaaaagagtgtttccaaactgctcaatgaaaagaaaggttcagctctgtgagaagaacgtacacatcacaatgtagattctcagaattcttttgtctagtttttatatgaacatatctcggtttctaccataggcttcaaagtgttccaaatgtccacttgcagaatctacaaaaagagagattcaaaactgcttaagcaaacatatgattaattttgtgagatgcatgcacacatcacaaagaagtttctcagattgcttatgtctacatttaaggtgaagatattttcttttctaccagaggaagcaaagaacttcaaatgtccacttgcagattctacaaaaagagtgtttcaaaactgctcaatgaaaagaaaggttcaatcctgtgagatgaatgcacacatcacaaagaagtttctcagaattcttctgtctggtttttatgtgaagatatttccttttccaccataggcctcaaaacgctccaaatgtccacttgaagattctacaaaaagagatttcaaaactgctcaaacaaaactttaactctgtgagatgaatgcacacatcacaaagtagtttctcagattgtttctgtctagattttatgtgaagatatttccttttctaccatagtctgcaaagcactccaaatatccacttccagattctacaaaaagagtgtttccaaactgctgagtcaaaataaaggttcaactctgtgggatgtaagcacaaatcacgaagaagtttctcagaattattctgcctcgtttttgtgtgaagatatttccttttccaccataggcctcaaagtgctccaaatgtccacttgcagattgtacaaaaagagagtttcaaaactgctcaatcaaaagacagctttaactctgtgagatgaatgcacacatcacaaagaagtttctcagattgcttctcctagattttatgtgaagatatttccttttctactataggccataaagcattccgaaagtccacttgcggattctacaaaaagagtgtttccaaactactcaatcaaaagaacgtttcaactctgtgagatgaaggcacacatcacaaagaagtttctcggaattcttctgtctaatttttatgtgaagacatttcattctccaccataggcctcatggctgtcgaaatgtccacttgcagattctacaaaaagagtatttcaaaactggtccatcaaaagaaagtttcaactctgtgagatgaatgcacccatcacgaagaagtttctcagaatgtttccatctaggtttatgtgaagatatttccttttccaccacaggtctcaaagcgctccaaatgtccacatgaagattctacaaaaagagagtttcaaaactgctcagtcaaacaaagggttaactctgtgagatgaatgcacacatcacaaagaagtttctcagattgcttctgtctagattttatgtgaaggtatttccttttctaccataggccaccaagcgctccaaatgctcacctgcagattctacaaaaacagtgtttccaaactgctcaatccaaagaaagtttcaactctgtgagatgaacatacacatcacaaagaagtttctcagaatgcttctgtatagttttttatgtgaagatatttccttttctaccataggccacaaagcgctccaaatgtccacttgcagattctacaaaaagagtgtttccaaactgctcaatgaaaagaaaggttcaatcctgtgagattaacacacacatcacaaagaagtttcttggaattctactgtctagtttttctgttaagatatttccttttccaccataggcctcaaatcactccaaatgtccacttgcagattctagaaaaatagactttcaaaacttctcaatgaaaagaaaagtttatctctgtgggatgaatgcacacatcacaaagtagtttttcagattgcctctgtctagattttatgtgaagatatttccttttccaccatagacctcaaagcgttccaaatgtcctcttgcaggtggtacaaaaatagagtttcaaaactgcttcatcaaaacaacggtttaattctgtcagatgaatgtacacatcacaaagaagtttctcagattgcttctgtctagattttatgtgaagatatttcattttctgtcataggccgtaaagcgctccaaatgtccagttgcagattctacaaaaagagtctttccaaactgctcactcaaaagaaagtttcaactctgtgagatgaacgcatacatcacaaagaagtttctcagaattattctgtctagtttttatgggaagatatttccatttcaaccattggcctcaatgcgctccaaatgtccacttgcaggttctacaaaaagagagtttcaaaactgctaaatcaaaagaaatattgaagtctgtgagatgaatgcgcatatcacaaagaaatttctcagattacttctgtctagattttatgtgaatatattcccttttttaccaaaggccgcaaagcgctcgaaatgacaatttgcagattctacaaaaagtgtgtttgcaaactgctaaatcaaaaggaatgttcaactctgtgagacgaacacacacatcacaaagttgtttctcagaatatttctgcctagtttatttttatttatttttattttttattattatactttaagttttagggtacatgtgcacatcgttcaggttagttacatatatatacatgtgccatgctggtgcgctgcacccactaactcgtcatctagtattaggtgtatctcccaatgctatccctcccccctccccccaccccacaacagtccccagagtgtgatgttccccttcctgtgtccatgtgttctcattgttcaattcccacttatgagtgagaatatgcggtgtttggttttttgttcttgtgatagtttactgagaatgatgattttcaatttcatccatgtccctacaaaggacatgaactcatcattttttatggctgcatagtattccatggtgtatacgtgccacattttcttaatccagtctatcattgttggacatttggcttggttccaagtctttgctattgtgaataatgccgcaataaacatacgtgtgcatgtgtctttatagcagcatgatttgtagtcctttgggcatatacccagtaaggggatggctgggtcaaatggtatttccagttctagatccctgaggaattgccacactgacttccacaatggttgaactagtttacagtcccaccaacagtgtaaaagtgttcctatttctccacatcctctccagcacctgttgtttcctgattttttaatgattgccattgtaactggtgtgggatgatatctcattgtggttttgatttgcatttctctgatggccagtgatgatgagcattttttcatgtgtcttttggcgcataaatgtcttcttttgagaagtgtctgttcatgtccttcgcccactttttgatggggttgtttgttgttttcttgtaaatttgttatttgaatatatttccttttccaccatagacctcaaagcgttacaaacgtccacttgcagatcgtacaaagatagtttcaaaactacttcatcaaaagaaaggtttaactctgtcagatgaattctcacatcagaaagaattttctcagattgcttctgtctagattttatgtgaagatatttccttttctgccacagaccacaaagtgctccaaatgtccacttgcagattcaacaaaaagagtgtttccaaatgacccaaacaaaagaaagtttcaactctgtgagaggaacgcacacatcacaaagtagtttctcagaatttgtctttctagtttttatgagaagataattcctttttcaccataggtctcaaagccttccaaatgtacaaatgcagattcgacaaaaagagagtttgaaaactgctcaatcaaaagaaagggttaactctgtgagatgaatacacaaatcacaaagaagtttcacagattgcttctgtctagattttatgtgaagatatttccttttctaccatagaccgtaaagtgctccaaatgttcacctgcagattctacaaaaagagtgtttccaaaatgctcaatccaaagaaaggttcaactctgtgagatgaacatacacatcacacagaagtttcccagaatgcttctatatagtttttatgtgaagatatttccttttctaccataggccacaaagcgctccaaatatccacttgcagattctacaaaaagagtgtttccaaactgctcaatgaaaagaaagattcaatcctgtgagatgaactcacatatcacaaagaattatctcagaattcttctgtctaccttttatgtgaaggtatttccttttccaccataggcctcaaatcactcaaaatgtccacttgcagatattacaaaaatagattttcaaaactgctccatcaaaagaaaagtttaaatctgtgggatgaatgcacacatcactaagatatttctcagatttcttctgtctagatttcatgtgaagatatttccgtttctactgaaggccgcaaaactctgtctggtttttatgtggagatattttattttccatcataggactcaaagtgctccaaatgtccactttcagattctacaaaaagagtgtttctaaattgctcaatgaaaagaaagctttaactctgagatgaatgacacatcacaatgaagtttctcagattgctactgtgtagattttatgttaagatatttccttttctcacagagaccgcaaagcactccaaatgtccacttgcaggttctacaaaaagagagtttcaaaactgctcaattcaaagaaaggttcaactctgtgagatgaatgcacacatcacaaagaagtttctcagaattcttctgtctagtttttatgtgaagatattcccttctaaaataggcccaaaagtgctccaaatgtctgcttgcaggttctacataaagagtgtttccaaactgctccatcaaaagaaatgttcaactccgtgagattaacgcacgcatcacaaagaagtttctcaaaattcttctgactagttttcatgtgaagatttttgcttttccaccacaggcctcaaagtgctccaaatgtccacttgcagatgctacaaaaagagtgtttccaaactgctcaatcaaaagaaagtttcaaccctgtgagatgatcacacacatcagaaagaagtttctcaggttgcttctgtctagattttatgtgaagatatttcctttagtacaacaggccccaaagtgctccaagtgtccacttgcagattctagaaaaagagtgtttccaaactgctgaatcaaaagaaaggttcaactctgtgagatcaacgcacacatcacaaagaaatttctcagaattcttctgtatagtttttatgtgaagatatttccttttccacaataggcatcaaagagttccaaatgtccacttgcagattctacaacaagagtatttcaaaactgttcaatcaaaagaaaggcttaagtctgtgagatgaatgcacacaacactaagaagcttctcagattacttctgtctagattttttgtgaaaatttttccctttctaccacaggccgcaaaacgctccaaatgtccactttcagattctacaaaaacagagtttcaaaactgcccaatcaaaagaaagctttaaatctgtgaggtgaaaacacatatcaaaaagtattttctcatatagcttctgtctagattttatgtgaagatatttccttttctgccttaggccacaaagctctccaaaggtctacttgtagattcaacaaaaagagggtttccaaactgctcaaccaaaggaaagtttcaagtatgtgagatgaacgcacacaccacaaagaagtttctcagaattcttctgtctagtttttatgtgaaggtattttcttttccaccataggcctcaaagtgctctaaatgtccacttgcagatcctacaaaaagaaagtttcaaaactgctccatcaaaagaaaagtttaaccctgtgagatgaatgcacacatcacaaggaagtttctcagattgctactgtgtagattttatgttaagatatttccttttctaacagaggccacaaagagctccaaatgttcacttgcagattctacaaaaagagagtgtcaaaactgctcaattcaaggaaaggttcaactctgtgagatgaatgcacacatcacaaagaagtttctcagaattcttctgtctagtttttatatgaagatattcccctttctaaagtaggcccaaaagcgctccaaatgtctgcttgcagattctacaaaaagagtgtttccaaactgctccatcaaaagaaatgttcaactctgtgagattaacccacgcatcacaaagaagtttctcaaaattcttctgtctagtttttatgtgaagatttttgcttttccaccacaggcctcaaagagctccaaatgttcacttgtagaatttacaaaaagagagtttcataaatgctcaatcaaaagaaaggtttaactctgtgagatgaatgcacacatcacaaagaagtttctcacattgcttctgtgtagatgttaggtgaagatacttccttttctgccataggccgcaaagcgctcaaaatgtctacttgcagattctacaaaagagtgtttccaaactgctcaatcaaaagaaagtttcaactcagtgggatgaaagcacatatcactaagaagtttctcagattgcttctgtttaggttttttatgaagttatttccttttctaccattggctgcaaagcgctccaaatgtccacttgcagattctacaaatgattttttccaaactgccgaatcaaaagaaatgttcatctctgtgagatgaacacacacatcacaaagaagtttgtcagaattcttctgtaaagtttttatgtgaagatatttccttttccaccataggccccaaagcaccccaaatctccacttgcagtttctgcaaaaagagagtttcaaaactactaaatcaaaagaaaagtttaactctctgagatgaaagcacacatcaaaaataagtttctcagattgcttctctctagattttatgtgaagatatttccttttctaccataagatgcaaagcgttccaattgtccattgcagattctacaaaaagaatgtttccaaactgctcaatcaaaagaaagtttcaaatctgtgagatgaacacatacatcacaaagaagtttctcagaatttttctgtctattatttatgtgaaaatattaacttttccaccataggccacaaagcgctccaaatgtccacttgcagattctacaaaaagagggtttctcaatcaagagaaagttttaactctgtgagatgaatgcacacatcacaaagaagtatctcagattgcttctgtctagattttatgtgaagatatttccttttctaccacaagatgcaaagtgctacaaatgtacgcttgcagatgctacaaaaagtgagtttcgaaactgctcaatcaaataaagttttaactctgtaagatgaatgtacacatcacaaagaagttcctcatcaatgtcttcttttgagaagtgtctgttcatgtccttcacccactttttgatagggttgtttgtttttttcttgtaaatttgtttgagttcattgtagattctggatattagccctttgtcagatgaataggttgcgaaaattttctcccattttgtgggttgcctgttcactctgatggtagtttcttttgctgtgcagaagctccttagtttaattagatcccatttgtcaattttggcttttgttgccattgcttttgttgtttcagacatgaagtccttgcccatgcctatgtcctgaatggtagtgcctgggttttcttctagggtttttatggtttgaggtctaacgtttaagtctttaatccatcttgaattgatttttgtataaggtgtaaggaagtgatccagtttcacctttcttcatatggctagccagtttcccagcaccatttattaaatagggaatcctttccccattgcctgtttttctcaggtttgtcatagatcagatagttgtagatatacggcgttacttctgagggctctgttctgttccattgatctatatctctgttttggtaccagtaccatgctgttttggttactgtagccttgtagtatagtttgaagtcaggtagtatgatgcttccagctttgttcttttggcttaggattgacttggcgatgcgggcacttttttggttccatatgaactttaaagtagttttttccaattctgtgaagaaaatcattggtagcttgatggggatggcattgaatccataaattaccttgggctctatggccattttcatgatattgattcttcctacccatgaggatggaatgttcttccatttccttgtatccttttttatttcattgagcagtggtttgtagttcttgaagaggtccttcatgttccttgtaaggtggattcctaggtattttattctctttgaagcaattgtgaatgggagttcactcataatttggctctctgtttgtctgttattggtgtataagaatgtttgtgatgtttgtacattgattttgtatcctgagactttgctgaaattgttcatcagcttaaggagattttgggctgagacaatggagttttctagatatacaatcatgtcatctgcaaacagggacaatttgacttcctcttttcctaatagaataccctttatttccttttcctgcctaattgccctggccagaagttccaacactatgttgaataggagtgttgagagagggcatccctctcttgtgccagttttcaaagggaatgcttccagtgtttgcccattcagtatgatattggctgtgggtttgtcatagacagctcttactgttttgagatacgtcccatcaatacgtaatttattgagagtttttagcatgaagtgttgttgaattttgtcaaaggccttttctgtgtctattgagataatcatgtggtttttgtctttggttctgtttaaatgctggattacatttattgatttgcttatattgaaccagccttgcatctcagggatgaagctcacttgatcatggtggatcagctttttgatgtgctgctggattcgatttgccagtattttattgaggatttttgcatcaatgttcatcaaggatactggtctaaaattctctttttttgttgtgtctctgcctggctttggtatcaggatgatgctggcctcataaaatgagttacggtggattccttctttttctattgattggaataatttcagaaggaatggtaccagttcctccttgtacctctggtagaattcggctgtgaatccatctgttcctggattctttttggttggtaagctattgattattgccacaatttcagctcctgttattggtctattcagaggttcaacttcttcctggtttagtcttcggagagtgtatgtgtccaggaatttatccattttttctagattttctagttttttgcatagaggtgtttgtagtaatctctgatggtagtttgtatttctgttggatcggtggtgatatcccctttatcattttttattgcgtctatttgattcttctctctttttttctttataagtcttgctagtggtctatcaattttgttgatcctttcaaaaaaccagctcctggattcattaattttttgaagggttttttgtgtctctatttccttcagttctgctctgattttagttatttcttgccttctactagcttttgaatgtgtttgctcttgcttttctagttcttttaattgtgatgttagggtgtcaattttggatctttcctgctttctgttgtgggaatttagtagcataaatttccctcacacactgctttgaatgtgtcccagagattctggtatgttgtttcttcgttctcattgtttcaaagaacatctttatttctgccttcattttgttatgtatccagtagtcattcaggagcaggttgttcagtttccatgtagttgagcggttttgagtgagtttcttaatcctgagttctagtttgattgcactgtggtctgagagacagtttgttataatttatgttcttttacatttgctgcagagagctttacttccaactatgtggtcaattttggaataggtgtggtgtggtgctgaaaaaaatgtacattctgttgatttggggtggagagttctgtagatgtctattaggtccacttggtgcagagctgagttcaattcctggatatcctaaaaaaacatgaaaaaatgctcatcatcactggccatcagagaaatgcaaatcaaaaccacaatgagatattatctcacaccagttagaatgacaatcattaaaaagtcaggaaacaacaggtgctggagaggatgtggagaaataggaacacttttacactgttggtgggactgtaaactagttcaacccttgtgaaagtcagtgtggatattcctcaggtatctagaacaagaaataccacttgacccagccatcccattactgggtatatacccaaaggagtataaatcatgctgctataaagacacatgcacatgtatgtttattgtggcactattcacaatagcaaagacttggaaccaagccaaatgtccaacaatgatagactggattaagaaaatgtggcacatatacaccatggaatactatgcagccataaaaaatgatgagttcatgtcctttgtagggacatggatgaaattggaaatcatcattctcagtaaactatcgcaaaaacaaaaaaccaaacaaagcatattctcactcataagtgggaattgaacaatgagaacacatggagacaggaaggggaacgtcacactctggggtctgttgtgggttgtggggaggcaagagggatagcagtgggaaatatacctaatgctagatgacgagttagtgggtgcagctcaccagcatggcacatgtatacctatgtaagtaacctgcacattgtgcacatgtgtcctaaaacttaaagtataataataataataataaaacaagtttttcagattgcttctgtctagactttatgtgaagatatatccttttctaccatagccacaaagccctccaaatgtccacttgctgattctacaaaaagagattccaaacttctcaatcaaaagaaagattcaactctgtgacatgaacgcacacatcacagagaagtttctcagaattcttttgtctagttgttatgtgaagatatttccttttccaccataggcctcaaatcgctccaaatgtccactagcagatcctacaaaaagggtgtttaaaagctgctgaatcaaaagaaagttttaactctgtgagatgaaaacgcacatcacaaagtttgtccgaatgcttctgtatagtttttatatgaagatatttccttttccaataaaggccttaaagtgccccaaatgtacacttgcagattctacaaaaagagtgtttcaaaactgctgaatgaaaagtgaggttcatctctctgatgaatgcacacatcacaaagaattttgtcagaatgcttctgtctagtttttatgtgaaggtatttccttttccaccataagcctcaaagcgctcaaaatatccacttgcagattctacaaaaagagtgattcaaagctgctcaatcgaaagaaagtttaaactctgtgagatgattgcacacatcacaaataagtttgccagaatgcttctgtctagtttttttgtgaagatatttccttttacactataggcctcaaagcgctccaaatgtccacttgcagattctacaaaaagtgtttcaaaactcctcaatgaaaagtaagtgtcaactctgtgagatgaatgcacacatcacagacaagtttgtcagaatgcttctatctagtttttatgtgaagatatatccttttccaccataggacacaaagtgctccaaatgtccactgcagattcaaaaaaaagagtgtttcaaagctgccgaatcaaaagaaatgttcaactcggtgaggtgaatgtacacatcacaaagaagtttgtcagaatgcttctgcctggtttttatgtgaagatatttccgtttccaccataggcctcaaagcgccccaaatgtccacttccagattctacaaaaaaaaagtgtttcaaatctgctcaatcaaaagtaagggtcacctctctgagatgaataaagaaatcacaaagaagtttgtcaaaattcttgtgtctagtttttatgtgaagatatttcttttttcaccataggcttcaaagcgcttccaaagtccactcgcagattctacaaaaagggtgcttaaagctgctcaatcaaaggaaagtttcaactctgtgagatgaatgcacacgtcaaaaagaagtttgccagatttcttctgtctagtttttatgtgaagatatttccttttccaccatagtcctcaaagcgctccaaatgtccacttgcagattctacaaaaacattgtttcaaaactgcacaatcaaaagaaagtttcaactccgtgagatgaatgcacacatcacaaagaagtgtgtcagaatgcttctgtctagttattacgtaaagatacttccttttccaccagacaccaaaaagcgctccaaatgtccacttgcagattctacaaaaagagtgtttcaaagctgctcaatcaaaagaaagttcaactctgtgagatgaatgcacacatcaaaaagaagtttgtcagaatgcttctgtcttgtttttatgtgaagatattaccctttccaccatgggcctcaaggcgctccaaatgtccacatccagattctacaaaaagagcttttgaaagctggtcaatcaaaagaaagtttcaactctgtgagatgaatgcacacatcacaaagaagtttgtcacaatgcttctgtctagtttttatgtgaagatttttccttttccaccattggtctcacagcactccaaatgtccacttgcagattctacaataacagtgtttcaaagctgctcaatgaaaagtaaggttcaactttgtgagatgaatgcacacatgatgaagacatttgtcaagatgtttctgtctagttctcatgtgaagatatttccttttccaccataggcttcaaatcactccaaacgtccacttgcaaatagtacaaaaagcgtctttcaaaactcctcaatcaaaagtaagattcaattctgtgagatgaatgcacacatcacaaagaagtttggtagaatgcttctgtctagtttttatgtgaagatatttccttttccaccataggcctcaaagtgttccaaatgaccacttgcagatcctacaaaaagagtgtttcaaagctgctcaatctaaagaaaagttcaactctgtgggatgaatgcacacatcacaaagaaatttctcaccatgcttgtgtctagttattaaaggaagatatttcgttatccaccataggaatcaagttgctccaaatgtctacttgcagattctacaaaaagagtgtttcaaaactgctcaatgaaaagtaagtttcaaccctgtgacatgaatgcacacatcagaaataagcttgtcggaatgcttctgagtagtttttatgtgaagatatttccttttccaccatatgcctcaaagcgccccaaatgaccacatgaagattctgcaaaaagggtttcaaaactgctcaacgtaaagtaaggttcaactctgtgagatgaatgcacaaatcacaaagaagtttgtcagaattcttctgtctagtttttacgttatttccttttccaccataggcctcaacgtgcgcaaaatgtccactctcagattctacaaaaatggtgtttcaaagttgctcaatcaaaagaaatgttcaactctgtgagatgaatgtacccgtcacaaaggagtttgacagaatgcttctgcatagtttttatgtgaaggtattccttttccaccattggcctcaaagcactccacatgtccgcttgcagtttctacaaaaagagtgtttcaaaactgctcaatcaaaagaaaggtccaattctgtgagatgaatgcacacatcacaaaattttttcagaatgcttctgtctagtttttatgtgaagatatttcattttccaccataggcctcaaagcgctccaaatgtctacgtgcagatcctacaaaaagagtgtttcaaattggtcattcaaaactaattttcaactccataagatgaatgcacccattatgacgaagtttgtcagaatctttctctatagtttttatgtgaagatatttccttttccgccataggcctcaaagcactccaaaagtttacttgcagattctacaaaaacagtgtttttaagctgctcaaacaaaagaaaagttcaactccgtgagatgaatgcacacatcacaaagaagtttttcattatgcttatgtctagtttttatgtgaagatatttccttttccatcatagtcctcaaagtgctccaaatgtccagttgcagattttacaaaaagagtgtttcaaaactgctcaatcaaaagaaaatttcaactctgtgacatgaatgcacacatcacaaagaaatctctcagaatgcttctgtctaatttttaattgaagatatttctttttccaccataggcctcaaagcactcaaatgtccacttgctgattctacaaaaagagggtttccaaactactcaatcaaaagaaaggttcaactctgtgagataaatgcacacatcacaaagtaatttgtcagaatgcttctgtctagtttttatgtgaagatatttccttctccaccataggcctcaaagcactccaaatatccaattccagatagtacaaaaagggtgtttcaaaactgctcaatcaaaagcaatgttcaactctctgagatgaatgcacacatcacaaagaagtacctcagaaagcttctgtctagttttaatgtgaagatatttccttttccaacataggcctcttaggggccaaatgtccacgtggaaattctacaaagagtgtttcaaaactgctcaatcaaaagaaagattcaactctgtgagatgaatgatcacatcacaaagaattttctaagaatgatcctgtctagattttttgtgaagtttttaccttttcgacaataggcctcaaagcgctccaagtgtacacttgcagattctacaaaaagagtttttcaaaactgttcaatgcaaaggaagtttcaactccatgagatgaatgcacacatcacaaaggagtttgtcagaatgtttcagaatagtttttatgtgaagatatttccttttgcaccatcagttgcaaagccctccaaatgtccatttgcagattctacagagagtgtttcaaaactggtcaatcaaggccgggcgcggtggctcacgtctgtaatcccagcactttgggaggccgaggcgggtggatcatgaggtcaggagatcgagaccatcctggctaaaacggtgaaaccccgtctctactaaaaatacaaaaaattagccgggcgcggtggcgggtgcctgtagtcccagctactcaggaggctgaggcaggagaatggcgtgaacccgggaagcggagcttgcggtgagccgagattgcgccactgcagtccgcagtccgacctgggcgacagagcgagactccgtctcaaaaaaaaaaaaaaaaaaaaaaaaaaaaaaaaaaaaaaaaaaaaaactggtcaatcaaaagaatggttcaactctgagatgaatgcacacatcacaaagaagtttttcagaatgtttctgtctagttcctaagtgaagatactttcttttcgaccataggcctcatagcgctccaaatatccacttgcagattctacagagagttaccaaattactcaatcaaaagaaatgttcaactctgtgagatgagtgcacacatctcaaagaaatttgttagaatgcttctgtctagtttttatgtgaagatatttccttatccaccataggcctcaaagcactccaaaagtccacttgcagatagcacaaaaattgtgtttcagaactggacagaaacactctgacaaacttctttgtgatgtgtgccttcatctcacggagttgaacatttctgttgattgagcagttttaaaacactatttttgtagattctataagtgtacaattggagcgctttgaggactatggtggaaaaggatatatcttcacataaaaattagacagaagcattctgacaaactgccttgtgatgtgtgcattcatctcacagagttgaacatttcttttgattgaacagctttgaaacactctttttgtacaatctgcaagtggacatttggagcactttgagacccatggtggagaaggaaatatcttcacataaaaacgagaaaaaagaattctgagaaactcgtttgtgttgagtgtgttcatctcacacagttgagcctttctttttattgagcagtttggaaacactcttttggtagaacctgcaagtggacatttggaacaatttcaggcatatggtgaaaaaggaaatatattcacataaaaactagacagaagcgttctgacaaacttctttgtgatatgtgcattcatctcaccgtggtgaaactttgttttgattgagcagctttgaaacactctttttgtagtatatgcaagtggacatttggagcgctttgaggcctatagtggataaccaaatatattcatataataactagacagaagcattttgagaaacttctttgtgatgtgtgaattcatctcacactgatttgaacctttcttttgattgatcatctttgaaacactctttttgtagaatcagcaagtggatatttggagcgctttgaggcctatggtggaaaaggaaatatcttcacataaaaaccagacagaagcattctgacaaacttctttgtgatgtgtgcattcatctcacagaattgaaccttacttttcattgagcagttttgaaacactctttctgtagaatctgctagtaagcaattggaggactttgagtcctattgaggaaaaggaaatgtcttcatatagaaactagaaagaagcccgctgagaaacttctttgtgatgtgcgcattcatctcacagggttaaaccttgcttttcattgagaagctttgaaacactctttttgtagaatctacaagtggacatttggagcactatgaggcctatggtggaaaaggaaatatcttcacataaaaactagacagactattctcacaaacttctttgtgttgtgtgcattcatctcacagggttgaaccttacttttcattgagaagttttgaaacactctttttgtagtatctgcaagtggacatttggagcgctttgaggcctatggtggaaaagtaaatatcttcaggtaaaaagtagacagatgcattctgagaaactactttgtgatgtgtgcattcatctcacagagttgaacctttcttttgattgaacaactttgaaacactctttttgtagaatctgcaagtggacatttggagagctttgaggcctatggtggaaaaggaaaaatcttcacataaaaactagacagaagcattctgacaaacttctttgtgatgtgtgcactgatctcacagagttgaaccttatttttcattgagcagttttgaaatactctctttgtagaatctgcaagtggacatttcgtgcgctttgaggcctatggtggaaaaggaattatcttcacataaaaactagacagaagcattctgacaaccttctttgtgatatgtgcattcatctcacagagttgaaccttactttcgattgagcagttttgaaacactctctttgtagaatctgcaagtggacatttgctgcactttgaggcctatggtggataacaaaatatcttcatataataactagatggaagcattatgaaaaactcctttatgatgtgtgcttgcatcttacagagtggaacctttcttttgattgagcaatttggaaaccctctttttgtagcatctgcaattggacatttggagtgctttgaggcctttggtggaaaaggaaatatctgcacataaaaaccagaaagaagctttctgacaaactcctttgtgatgtgtgaattcatctcacagaattgaaccttacttttgattgagcagttttgaaacacccgttttgtagtatctacaagtggacatttggagtgctttgaggcctatggtggaaaaggaaatattttcacataagaactaggcagaaggattctgagaaattcctttgtgatgtgtgcattcatctcacagagttgaaccttactttcgattaagcagttttgaaacactcttttttgtagaatctgcaagtggacatttgctgcactttgaggcctatggtggttaatgaaatatcttcatataataactagacagaagcattatgccaaacttctttatgatgtgtgcattcgtctcacagagtggaacctttcttttgattgagaagctcagacacactctttttgtagcatctgcagttggacatttggagcgctttgaggcctttggtggaaaaaggaaatatcttcacataaaaaccagaaagaagctttctgacaaacttctttgtgatgtgtgccttcagctcacagagttgaacctttcttttgattgagcaatttggaaaccctctttttgtagaatctgcaagtggacatttggagtgctttaaggcctatggtggaaaaggaaatatcttcacataagaactaggcagaaagattctgagaaattcctttgtgatgtgtgcattcatctcacagagttgaaccttactttcgattgagcagttttgaaacactcttttttgtagaatctgcaagtggacatttgctgcactttgaggcctatggtggttaatgaaatatcttcatataacaactagacagaagcattatgacaaacttctttgtgatgtgtgcattcgtctcacagagtggaaactttcttttgattgagcagctctgaaacactctttttgtataatctgcaattggatatttggagtgctttgaggcctttggtagaaaaggaaatatcatcacataaaaaccagacagaagcattctgacaaactcctttgtgatgcgtgcattcatctcatggaattgaaccttacttttcattgagcagttttgaagcactctttttgtagaatctacaagtggacatttggagcacttgagagctatggttgaaaaggagatatctttacataaaaactagacagaagcattctgacaaacttctttgtaatgtgtgcattcacatcacagagttgaaccttaccttcaattgagctgtttcaaaacactctttttgtagaatctgcaagtggacatttgaagcacttgaggcctatgttggaaaaggaaatatctccacataaaaattagacaaaagcattctgacaaacttctttgtgatgtgtacattcatgtcacagagttgaaccttacttttgattgagcagttttgaagcacccttttggtaatatccacaagtggacatttggagtgctttgagacctttggtggaaaaagaaatatcttcacataagaactaaacagaagcattctgacaaatttctctgcgatgggtgcattcatctcacagatttgaactttattttgattaagcagctttgaaacactgtttttgtaaaatctgcaagtggacattaggagcgctttgaggcctatgttggataacgaaatatcttgatgtaaaaactagatagacgcattctgacatacatctttgtgatgtgtgcattaatctctcagagttgaaacttaattttcattcagaagttttgaaatactctttttgtactatctgcaagtggacatttggagcgctttgaggcctatggtggaaaagtaaatatcttcacataaaaactagacagaagcattctgacaaacttctttgtgatgtgtgcatttatctcacagagttgaaccttacctttcattcagcagttctgaaacactctttttgttgaatctgcatttggacatttggagaactttgaggccaatggtggaaaaggaaatatcttcacataaaaactagacagaagcattgtgacaaccttctttgtgacatgcgcattcatctcacagagttgaaccttacttttgattgagcagttttgaaacaccctttttgtaacgtctgcaactggacatttggagtgctttgaggcctatggtggaaaaggaaatatcttcacataaaaaccagacagaagcattctcacaaacttctttgtgatgtgtgcatttatctcgcagagctggacctttcttttgattgagcagctttgaaacactctttttgtagaatctgcaattggacatttggatcactttgaagcctatggtggaaaaggaaatatcttcagataaaaactagacagaagcattttgaaaaacttctttgtgacgtttgcattcatctcactgacttgaacctttcttttgattgagcagttttgaaaaagtattttatagaatctgcatgtggacatttggagcgctttgaggcctatggtagaaaagaaaatatcttcacatgaaaactacacagaagaattctgacaaacttctttgtgatgtgtgcattcatctcacagagttgaacctttcttttgattgagcagctttgaaacaccctatttgtaaaatctgcaagtgaacatttggtgcgctttgaggtctctggtggaaaagaaaatatcttcacatacaaactagacagaagcattctgacaaactactttgtgatttgtgcattcatctcacagagttgaacctttcttttgattcagcgggtttgaaacaccctttttgtagaatctgcaagtgaacatttggagcactttgaggctgatggtggaaaaggaaatatcttcacataaaaactaaacagacgtattctgacaaccttctttgtgatgtgtacattcatctcacagagttgaaacttacttttgatagagcagttttgaaacatcctttttgtgctatctgcaagtggacatttggagtgctttgaggcctatggtggaaaaggaaatatcttcacataagaactagacagaagcattctgagaaatttctttgtgatgtgtgcaatcatctcacacagttgaaccttacttttgattgtccagttttgaaaaactctttttgtagaatctgaaagtggacatttggagcgctttgaggcctatgatggataacgaaatatcttcatataataaatagagagaagcattatgttaaactttttgtgatgtctgcatacatctcacaaagagttgaaactttcttttgattgagcagctttgcaacattctttttgtggaatctgcaagtggacatttggagtgctttgagacctatggtggataacgaaatatgttcacataaaaattggacagaagcattctgagaaacttctttgtgatgtgtgcattcatctcacagagttgaacctcccttttgattgagcactttggaagcactctttctgtaaaatctgcaagtggacaattggagtgctttgaggcctatggtggaaaaggaaatatcttcacataagaactagacagaaacattctgagaaatttctttgtgatgtgtgcaatcatctcacagagttgaaccttacttttgattgtctagttttgaaaaactctttttgtagaatctgaaagtggacatttggagcgctttgagtcctatgatggataacgaaatatcttcatataataaatagagagaagcattatgattaactttttgtgatgtctgcatacatctcacaaggagttgaaactttcttttgattgagaagctttgcaacattctttttgtagaatctgcaagtggacatttggagtgctttgaggcctatggtggataatgaaatatgttcacataaaaattggacagaagcattctgagaaacttctttgtgatgtgtgcattcatctcacagagttgaacctcccttttgattgagcactttggaagcactctttctgtaaaatctgcaagtggacaattggagtgctttgaggtctatggtggaaaacgaaatatcttcacataaaaattggacagaagcattctgagaaacttctttgtgacgtgtgcattcatctcacagagttgaacctcccttttgattgagcactttggaagcactctttctgtaaaatctgcaagtggacaattggagtgctttggggtctatggtggaaaacgaaatatcttcacataaaaattggacagaagcattctgagaaacttctttgtgacgtgtgcattcatctcacagagttgaacctcccttttgattgagcactttcgaagcactctttctgtaaaatctgcaagtggacaattggagtgctttgaggcctatggtggaaaaggaaatatcttcacttaaaaactagacagaagcattctgacaaacttctttgtgatgtgtgcattcatctcacaaagaattgaaactttctttgattcaggagctttgaaacactctttttgtagaatctgcaagtgtacatttggagcgctttgaggcctgtggtggaaaagggaacatcttcacatatagaacagacagaagcattctgacaaacttcttttcgatgtgtgcgttcaactcacagatttgaaccttacttttcattgagcagatttgaaacactctttttgtagtatctgcaagtggacaattggaccgctttgtggcctatggtggaaaaggatatatcgtcacataaaaactagacagaaatcttctgaacaaacttctttgttatgtgtgcattcatctttcagagttgaacctttcttttgattgagcaactttgaaacactgtttttgtagaatctgcaagtagtcatttggagcgctttggggcctatggcaaaaaaggaaatatcttcacataaaaactagacagaagcattctgacaaacttctttgtgatgtgtgcattcatctcacagagttgaaacttacttttcattgagcaattttgaaacactctttttggagaatctgtaagtggacattttgagggctttgacgcacatggtggaaaaggaaataccttcacataaaaacgagacagaagcattctgacaaactactttgtaatgtgtgcattcatctctcagagctggacctttcttttgattgaacagctttgaaacactctttttgtagaatctgcaagtggacatttggagcactttgaggcctatggtggaaaaggaaatatcttcacagaaaaactagacagaagtattttgaaaaacttcattgtgacgtttgcattcatctcactgacgtgaacctttcttttgattgagcagttttgaaaaactctttttgtaggatctgcatgtggacatttggatcgctttgaggcctatggaggaaaagaaaatatcttcacctaaaaaccatacagaagtattctgagaaacttctttgtgatgtgtgcattcatctcacagagttgaactttacttttcattgagcaattttgaaacactctttttggagaatctgcaagtggacatttggagggctttgacgcatgtggtggaaaaggaaatatcttcacataaaaactagacagaagcattctgacaaccttcattgtgatatgtgcattcatctaagagagttgaaccttacttttgattcagcagttttgaaactctctttttgtagaatctgcaagtggacattcggagcacttttagacctatggtggaaaaggaaatatcttcacataaaaactagacagaacaattctgagaaacttctttgggatgtgtgcattcatctcacagagtaaaacattcttttgatccagcagttttgtaagtatctttttgtagaatctgcaagtggacattttgagccctttcaggcctatggtggaaaaggaaatatctacaaattgaaactcggcagaagaattctgagaaactcctttgtgatgcttgcattcatgtaacagagttgaacctttctttatgattgatcagtttggaaaccctcttttttagaatctgccagcggatatttggagcgttttgcagcctatggtggaaaaggaaatatcttcacatgaaaactaaatagatgtattctgagaaacttctatgtgatgtgtgcgttcatctcacagagttgaacctttcttttgattgagcagtttggaaacactctttttgtagaatctgcaagtggacgtatggaatgctttgaagcctatggtagaacaggaaatatcttcacataaaatctgaacagaggaattctgagagactcctttgtgatgtttgtattcatcttacagaattaaaccttccttttgaatgaacagatttgaaactgtctttttgtagaatctgcaagtggacattttgagcgcctggaggtctatggtggaaaagaaaatggcttcacatgaaaactagacagaagaattctgagaaacttctttcttatgtgtgcgttaatctcacacagttgaacctttcttttgattgagcagtttcaaacactctttttgtagaatctgcaagtggacttttggagcactttgtggcctacggtagaaaaggaaatattgtcacataaaatctagacagaagcaatctgagacttctttgtgatgtgtgcattcaccacacattgtttaacctttcccttgattgagcagttttgaaactctttttgtagaatctacaagtctacatttggagtgctttgaggcctatggtagaaaaggaaatatcttcacataaaaactagtcaaaagaattctgagaaacttcttgttgatgtgtgtgttcacctcacagagttgaaccgttgttttgattgagcagtttggaaaccctctttttgtagaatctgcatgtggacatttggagcgctttgaggcctatggtggaaaaggaagtatcttcacataaaaactagacagaagaattctgagaaacttctttgtgatgtctgcatttatctcacagacttgaacctttcttttgattgagcagtttggaaacactctttttgtagaatctgcaaggggacatttggagcggtttacaccctatgatagaaaaggaaatatcttcacatagaatatagacagaagcaatctgagaaacttatttctgatgtgtgaattcatctcacagagttaaacatttcttttgattgagcactttggaaacaatctttttgaagaatctgcaagtgaacatttggagagctttgtggcatatgatagtaaaggaaatatcttcaaataaaatttagaggaagaaatctgagaaattgcttttgatgtgtgcattcatgtcacagaattaaagctttcttttgattaagcagttttgaaactctctttttgtagaatctgcaagtggacatttcgaaagctttgcggcctgtgttagaaaaaggaaatatcatcacataaaaactagatagaagcaatctgagaaactttggtgtgacgtgtgaattcatctcccagagttgaaacatgcttttgatggaacagtgttgatatactcttttggtagaatctgcaagtggacatttcaaattcattgagtcttatggtggaaaaggaaatatctttacataaaaactagacagaaaaaacctgggaaacttctttgtgatgtgtgcattcatctcacagagttgaacctttcttttgaatgagcagtttggaaactctctttttgcagaatcttcaagtggacatttggagcgctttgaagcctatggtagaaaaggaaatatcttcacataaaatctacacagaagcaatctgagaaacttctttgtgatgtgtgcattcatcacaccatgttaaacctttctcttgactgaggagttttgaaacttactttttgtagtatctgcaagtggtcatttggagcgctttgaggactatggtggaaaaggaaatatcttcacataaaaaccagacagaataattctgagaaacttctttgtgatgagtgagttcatctcacagagttgaacctttctttgattgagcaggttggaagcactctttttgtacaatctgcaggtggatatttggagcgctatgctgcctatggtagaaaacgaaatatcttcacataaaatcaggacagaagcaatctgagaaacttccgtttaatgtgtgcgttaatctcacagagttaaatctttcttttgattgagcagtttgaaactctctttttgtagaatctgcaagtggacatttggagtgcttttagaactatggtggaaaaggaaatatcttcacataaaaaccagacagaagacttctgagaaacttctttgtgatgtgtgtattcatctcacggagttgaacctttcttttgattgagcagttttgaaatgctctttctgtagaatctgaaagtcagcatttggagctctttgaggaccatagtggaaaaggaaatatcttcacataaaaactagacagaagaattctgacagacatctttgtaatgtgcgttaatctcacaaggttgagccgttcttttgattgaacaatttggaaaatctctttttgtagaatctgcatgtggacatttggagcgctttgaggcctatggtggaaaaggaagtatcttcacataaaaactagacagaagaattctgaaaaacttctttgtgatgtgtgcatttatctcacagacttgaacctttcttttgattgagcagtttggaaacactctttttgtagaatctgcaagtgcacatgtggagagatttgcagccaatggtagaaaagcaaatatcttcgcataaattgtagacagaagcagtctgagaaaattctttgtgatgtgtgcattcatctcccatagttgaagttttcttttgaagggccagttttgaaatacgctttttgtagaacctgctagtggacatttcgaaaggcttgaggcctatggtggaaaataaaatatcttcacataaaaactatacagaagaattcttagaaacttctttgtgatgtgtgcgttcatctcacagagttgaacatttcttttgattgagcagtttggaaacactctttttgtagaatatgcaagtggacatttggaacgctttgcagcccatggcagaaagggaaatatattcacataaaatctagacagaagcaatctgagaaacttctttgtgatgtgtgcgttcatctcacagaattaagcctttcttttgattgagcagttttgaaattctttttgtagaatctacaagtgaacatttggagagctttgcggcttgcggtagaaaaggaaatatcttcacataaaatctagacagaagcactctgcaaacatctttctgatgtgtgcattcttctcacagaattaaacatttcttttgagtgagcagtttggaaactctctttttgtagtatctgcaagtggacatttggtgcgccttgaggcctacagtggaaaagaaaatatcttcacataaaatctacacagaagaaatctcagaaacttcttttggttgtgtgcattcatctcaccatgttaaacctttctcttgattgaggagttttgaaattttctttttgtagtatctgcaagtggtcatttggagcgctttgaggactatggtggaaaagaaaatatcttcacataaaaaccagacagaataattctgagaaacttctttgtgatgagtgagttcatctcacagagttgaacctttctttgattgagcagtttggaagcactctttttgtacaatctgcaggtggatatttggagcgctatgctgcctatggtagaaaacgaaatatcttcacataaaatcaggacagaagcaatctgagaaacatccgtttgatgtgtgcgttaatctcacagagttaaatctttcttttgattgagcagttttgaaactctctttttgtagaatctgcaagtggacatttggagcgcttttagaactatggtggaaaaggaaatatcttcacaaaaatctagacagaagacttctgagaaacttctttgtgatgtgtgtattcatctcacggagttgaacctttcttttgattgaacagttttgaagtgctctttttgtagaatcttcaagtcagcatttggagtgctttgaggaccatagtggaaaaggaactatcttcacatagaaactagacagaagaatgctgacagacatctttttgacgttcgttaatctcacaaggttgagcctttcttttgattgaacaatttggaaaatctctttttgttgaatctgcatgtggacatttggagcgctttgaggcctatggtggaaaaggaagtatcttcacataaaactagacagaagaattctgagaaacttctttgtgatgtgtgcgtttatctcacagacttgaacctttcttttgattgagcagtttggaaacactctttttgtagaatctgcaaggggacgtttggagcggtttgcgccctatgatagaaaaggaaatatcctcacataaaatatagacagaagcaatctgagaaacttgtttctcatgtttgcattcatccacagagttaaacgtttcttttgatagagtagttttgaaacactctttttgtagaatctgcaagtggacatttttaatgcagacatcacaaagtagtttctcagattgcttctgtctagattgtatgtgaagatatttctttttctaccatatactccaaagcgatccaaatgtccacttgcagattctacaaaaagagtgtttccaaactgtgcaaccaaaagaaagttcaactctgtgagatgaatgcacgcatcacaaaaaagtttctcagagttcttctgtctagtttttatgtgaagataatttattttccaatataggcctcaaggcgctcgaaatgtccacttgcaggttctacaaaagaatatttcaaaactggtccatcaaaagaaaggtttaactctgtgagatgaatgcaaacatcacaaagaagtttctcagattgcttcagtctagatgtcatgtgaagatatttccttttctaccatagcctgcaaaacgctccaaatgtccactttcagattctacaaaaagagagtttcaaaactgctccatcaaaagaaaggtccaactctgtcagatgaatgcacacatcacaaagaagtttctcttcttgcttctgtctagattgtatgtgaagatatttctttttccaccatacacctcaaagcactccaaatgtccacttgaagattctataaaaagagagtttcaaagctcttcaatcagaagaaaggttcaactctgtgagatgaatgcacacttcacaaagaagtttctcagatttcttctgtatagattttatgttatgatatttctttttctaccataggcctcaaagtgctccaaatgtccacttgcagattctacaaaaagagagtttcaaaacttctgaattaaaagaaaggtttaactctgtgagatgaatgaacacatcactaggaagctgctcagattgcttctgtctagatattatgtgaagatatttccttttctatcataggccgcaaagcgctccaaatgtccacttgcagattctacaaaaagaatgtttccaagctcctcattcaaaagaaagattgaactctgtcagatgaacgcacacatcacaaagaagtttctcagaattcttttgtctagtttttatgtgaagatatttcctttcccaccatagtcctcaaagtgctccaaatgtccacttgcagattctacagagagtttcaaaactccttcatcaaaaaaaaaatgttaacctctttctgatgaatgcacacatcacaaagaagtttctcaaattgcttctgtctagattttgtctgaagatatttccttttctgccacagactgcaaagcactccaaatatccattttcagattctacaaaaagactctttccaaactcctcaatcaaaagaaaggttcaactctgtaagatgaatgcagacatcacaaagatgtttcccagaattcttctgtctagttttttatgtgaagatatttcattttccaccagaggcctcaaggtgctcaaattgtccacttgcagattctacaaaaagagagtttcaaaactgctcaatcaaaagaaagctttaactctgtgagatgaatgcacacatcacaaagaagtttctcagattgcttctgtctacaatttatgtgaagatatttccttttatgctataggccccaaagcgctccaaatgtccacttgcagattctgcaaaaagagagtttccaaactgctcaatctaaaggaaggttcaactctgtgagaacaatgcacgcatcacaaagaagtttctcagaattcttctgtctagtttctatgtgaagatatgttattttccaccataggccacaaagcactctacatatccacttgaagattctacaaaaagagagtttcaaatctgctccatcaaaggaaaacttcaaccctctgagatgaatgcaccaatcacaaagaagtttatcagattacttctgtctatattttatatgaagatatttccttttccaatataggcctcaaagtgctccaaatatccacttgtaggttttacaaaaagagagtttcaaaactgttaaatcaaaacaaagctttaactctgtgagatgaatgcacacatcacaaagaagtttctcagattgcttctgtccagattttatgtgaagatatttccttttctaccataggccgcaaagcgctctaaatgtccacttgcagattctacaaaaagagtgtttccaaactgctcaatcaaaagaaagattcaactctgttagatgaatgcacacatcgccaagtcgtttctcagaattctgcctagttttcatttgaagatatttgctttccaaccatagtcctcaaagcgctccaaatgtgcacttgcagattctacaaacagagagtttcaaaactcgtgcatcaaaaaaagtttacctctttcagatgatcgcacacatcacaaataagtttctcagattgcttttgtctagattttgtctgaagatatttccttttctgccataggccacaaagcactccaaatatccacttgcagatcctacaaaaagagtgtttctgaactcctcaatcaaaagaaagtttcaactctgtgagatgaatgcacacatcacaaagaagtttctcagagttcttctgatttgtttttatatgaagatatttccttttctgtcataggcctttaagcactccaaatatccacttgaagattctacagaaagagagtttacaaagggctcaatcaaaagaaagttttaactctgtgagatgaatgcacacatcacaaagaagttaatcagattgcttctgtctagattttatgtgaggatatttctttttccagcctaggctgcacagcactccaaatgtccacctgaagattctactacaaagatttttccaaactgctcaataaaaagaaaggttcaactctgtgagatgaatgcacacatcacaaagtagtttctcagaatgcttctgtctagtttttatgcgaagatatttccttttccaccgtaggcctcaaaacgccccaaatgtccacgtgcaggttctacaaaaagagagcttcaaaactgctcaatcaaaaggaagttttaactctgtgagatgaatgcacacatcacaaagaagtttctcatattgcttctgtctacaatttatgtgaagatatttccttttataccataggccccaaagcgctccaaatgtccacttgcagattctacaaaaggagtgtttccaaacttctcaatcaaaggaaggttcaaatctgtgagaagaacacaggcatcataaagaagtttctcagaattcttctgtctagtttttatgtgaagatacattattttccaccataggccacaaagcactctaaatgtccacttgcagattctacaaaaagagagtttcaaatctggtccatcaaaagaaaacttcaaccctgtgagatgaacgcacatatcacaaagaagtttatcaggttgcttctgtctagattttatgtgaagatatttccttttataccatagattgcaaagcactccaaatgtccacttgaagattctacaaaaagaatgtttccaaactgctcaatcaaaagaaatgttcagctctatgagatgaacacagacatcacaaagaagtttctcagaattcttctatctagtttttatgtgaagatatttccttttcccccataggtctaaaatctctccaaatatccacttgcagattctacaaaaagagagtttcaaaactactgaatcaaaagaaaggtttaactgtgtgggatgaatgcacacatcacaaagaactttctcagattgcctctatctagattttaatgtgaatatctttccttttctaccataggcctcaaagcgctccaaaggtccacttgcagattctacaaaaagagtgtttccaaacagctcaatcaaaagaaatttttgactatgtgagatgaacgcactcatcccaaagatgtttctcagaattcttctgtctagtttttatatgaagatacttccttttccacgatgggcctcaatgtgatccaaatatccacttgcagattctacaaaaggagtgtttcaaaactcctcaatcaaaagaaagatttaactctgtgagatgaatgcaacatcacaaagaagtttctcagattgcttctgtctggattttatgtgaagatatttccttttccaccataggcctttaagagctccaaatgtccacttccagattctatgaaaagagagtcgcaaaattgctcaatcaagagaaagttttaactctgtgagataaatgcacacatcataaaaaaatttctcagtttgcttctgtctatattttatgtgagggtattccattttctaccataggctgcaaagctccccaaatatccacttacagattctaccaaaagagagtttcaaaactactctatcaaaagataggttcaaatccatgagttgaatgcacacataacaaggaagtttcccagaatgcttctgtgtagtttttatccgaagatatttccttttccaaaatagaccacaaagcccttcacatattcacttccagattctacaaaaaaagtgtttcaaaactactcagtgaatagaaaggttcaactctgtgtggtgaatgcatttttctcaaagaagtttcccagaatgcttctgtgtagtttttatttgaagatatttcattttccatcatagggcacaaagtgctccaagtatccacttgcagattctacagaaagagagatttaaaaatgctgaatcaaaagatagggtcaacactgtgagttgaatgcacacataacaagaagtttcgcagaatgcttctgtgcagtatttatgtgaagatatttcctttttcaaaataggcctcaaatcgctccaaatatccacttgcagattctacaaaaagtgtttccaaacagctcaatcaaaagaacggttaaattctgtgagacaaatgcacacatcacaaggatgtttctcagaatgcttctgtgtagtttcagtttgaagatatttccttttccattataggcctcaaagggctccaaatatcgactggcagattctacaaaagagagattcaaatctgcccagtccaaagatagattcaactctctgagttgaatgcacatatcacaaagaagtttcccagaatgcttctgtgtagttttcatgtgaagatatttcgttttccacaatgggcctcaaagctctccaaatatcaacttgcagatactgcaaaaagagtgtttcaaaactgttcaatcaaaggaaggtttcaactctgtgtgatgaatgcactcatcacaaagaagtttctctgaatgcttctgtgtagtatttatttgaagatatatccttttccaccaaagagcacaaagggctccaaatattcacttgcagattctacaaaaagagagattcaaaacggctcaatcaaaagataggttcaactctctgagttgaatgcacacatcacaaagaagtttctcagaatgcttctgtgtagtttttatttgaagatatttccttttccacaataggcctgaaatcactccaaatatccacttgcagattctacaaaaagagtgtttcaaaactactcaatcaaaagaaagcttcaactctgtgaggtgaacgcacacatcacaaagaagtttctcaaaatgtttttgtgtagtttttaggttaagatatgtgcttttccaaagtaggcctcaaagcgctcataatatccacttgccgattatacagaaagagtgtttcaaaactgctctatcataagataggttgaaccctctgagatgaatgcacagatcacaaagacttttctcagaattcttctgtgtagtttttatttgaagatatttccctttccaccataggacgcaaatggttccaaatatccacttgcagattctacaaaaagagaaatagaaatctgttcaattataagataggttcaaccttgtgagatgaatgcacacatcacaaagatgtttctcagaatgcttctgtgtaatttttatgtgaagatacttccttttccacaatagagtgtttcaaaacttcccaatcaaaagaaaggttcaaccctgccagatgaatgcacacatcacaatcaagtttctcagaatgcttctgtgtagtttttatttgaagatattttcttttccaccataggccacaaagggctccaaatatccacttgcagattgtacaaaaagagagattcaaaactgcccaatcaaaagataggttcaactctgttagttgaatgcacgcatcacagaaaagtttcccaaaatgcttctgtgaaatttttatgtgaaaatatttctttttccacaatgggcctcaaagctctccaaatatcaacttgcagatactgcaaaaagtgtgtttcaaaactgctcaatcagaggaggatttcaactctgtgtgatgaatgcactcatcacaaagaagtttctctgaatgcttctgtgtaatttttatttgaagatatttctttttccaccatagagcgcaaagggctccaaatatccacttgcagattctacaaaaagatagtttaaaaacgggtcaatcaaaagataggttcaactctgtgagttgaagacacccatcaaaaagaagtttctcagaatgcttctgtgtaggttttatgtgaagatatctccttttctacagtaggcctcaaatcgatccaaatatccacttgtagattctacaaaaacagtttcaaaactgctcaatcaaaagataggttcaattctgtgagctgaatgcactcaccacagacatgtttctcagaatgcttctgtgtagtttttatgtgaagatatttccttttccacaataggcttcaaagctctccaaatatccacttgccgattctgcaaaaagagagattcaaaactgctcaatcaagacataggttcaactctgtgagttgaatgcacatctccaaagaagtttctcagaattcttctgtgtagtttttatttgaagatatttgcttttccacagtaggcctcaaagcgctacaaatatccacttgaagtttctgcaaaaagagagattcaaaactgctcaatcaaaagatagattcaactctgtgtgttgaattcacacataacaaaggagtttctcagaatgcttctgtgtagtttttatgttaagatatacccttttccaaaataggcctcaaagccttccaaatatccacttccagattctacaaaaagagtgtttcaaatttgctcaatgaaaataaacattcaacactgtgtgatgaatgcactcctcacaaagaagtttctctgaatgcttctgtgtagtttttatttgaagatatttctttttcaactttagggcacaaagagctcccaatatccacttgcagattctacaaaaagagagattggaaactgctcaatcagaagatacgttcaaccctgtgagatgaatgcacacatcacagagaagtttcccagaatgcttctgtgtatgtagtttttatttgaagatatttccttttccaccatatgctgcaaagggctctaaatattcaataacaaagtctacaaaagagagattccaaactgctcaatcaaaagatctgttcaactctttaagtttaatgcatatataacaaagaagtttctcagaatgtttctgttcagtttttatgtgaagatatttctttttccaccataggcctcaaagccctccaaatatccaattccagattctacaaaaagagtgttgcaaaattgatcaatcaaaggaagggttcaactctctgagatgaatgcactcatcacaaagaagtttctcagaatgctactgtgctctttttatttaaagatatttccttttccaccatagggtgcaaagggctccaaatatctacttacggattctacaaaaagagagattgaaaacttctcaatcaaaaaatacgttcaaatctgtgagttgaatgaacacataacaaagaagtttgtcggaatgcttctgtgtagtttttatgtgaagatatttccttttccaaaataggcctcaaagctcttgaaatatacacttccagattccacaaaaagagtgtttcaaaattgctcaatcaaaggaaaggttcaactctgtgtgatgaatgcactcatcacaaagaagtttctctgaatacttctgtgtagtttttatttgaagatatttcattttccacaatagggtgcaaagggctccaaatatggacttgaagattctacaaaaagagagattcaaagttgctcaatcaaaagaaaggttcaactctgtgagttgaatgcacacatcacaaagaagtttctcagaatgcttctgtgtagtttttaagtgaagatacttccttttccacaataggcctcaaaccgctccaggtatccctttgcagatactacaaaaagagtgtttcaaaactgctcaatcaaaagaaagtttcaactttgtgagatgaatgaacacatcacaaagaggtttctcagcatgcttctgtgtagtttttatgtgaacatatttgcttttccacaataggcctcaaagctctccaaatatccacttgcagattctgcaaaaagagagattcaaaagtgctcaataaggaggtagtttcgactctgtgagttgaatgcacatctccaaaaaagtttctcagaattcttctgtgtagtttttatttgaagtatttgcttttccaccgtaggccccaaatcgctacaaatatccacttgaagattctgcaaaaagagagaatcaaaactgctcaatcaaaagataggttcaactctggatgttgaatgcacacataacaaaggagtttctcagaatgcttctgtgtagtttttatgttaagatatactcttttccaaaataggcctcatagccctccaaatatccacttccagattctacaaagagtgtttcaaaactgctcaatgaaaagtaacgttcaacactgtgtgatgaatgcactcctctcaaagaagtttctctgaatgcttctgtgtagtttttacttgaagatatttccttttcaacaatagggcacaaagggctgcaaatatccacttgcagattctacaaaaagagagattggaaactgctcaatcataagatgcgttcaattctgtgagatgaatgcacacatcccagagaagtttcccagaatgcttctgtgtagtttttaagtgaagatacttccttttccacaataggcctcaaatcgctccaaatatccacttgcagattctacaaaaagtgtgtttcaaaactcctcaatcaaaagaaagtttcaactctttgagatgaatgaacacatcacaaagaagtttctcagaatgcttctgttttgttcttatttgaagatatttccttttcagcaataggcctcaaaactctccacatatccacttgcagattctgcaaaaagggagattcagagctgctcattcaaaaggtaggttcaactctgtgttttgaatacacacctcacaacgaagtttctcagaatgcttctgtgtagtttctatgtgaagatatttccttttctacaataggcctcaaagctctccaaatagcaactttcagattctgcaaaaagagagattcaaaactgcccaattagcagataggttcaactctgtgagttgaatacacacatcacaaagaagtttctcagaatgcttctgtgtagtttttatttgaagttatttccttttccaccataggccacaaagggatcaaaacatccaaatgcagattctaaaaaaaggagattcaaaactgctcaatcaaaagaaacgttcaactctgtgacatgaatgtgcacaccacaaaaaagtttctcagaatgtttctgtgtagtttttatgtgaagatatttgcttttccacggtaggcctcaaagcgctccaaatatgtacttgcagattctataaaaggagtgtttcaaaactgctgaataaaaagaaaggatcaactctgtgaaatgaatggacacatcacaaagaagtttctcagaatgcttctgtgtagcttttatttgaaggtatttccttttccaccataggccgcaaagggatcgaaatatccaattgcagattctaaaaaaaggagattcaaaactgctcatttctgtgtagtctttatgtgaagatatttgcttttccatgttaggcctcaaagcgatccaaatatctacttgcagatcctgtaaagtgagtgtttcaaaactgctgaataaaaagaaaggatcaactctgtgaaatgaatggacacatcacaaagaagtttctcagaatgcttctgtgtagtttttatttgaaggtatttccttttccaccataggccacaaagggattgaaatatccaattgcagattctaaaaaaaggagattcaaaactgctcaatcaaaataaatgttcaactctgtgacatgaatgtgcacaccaccaaaaagtttctcagaatgtttctgtgtagtttttatgtgaagatatttgcttttccacggtaggcctcaaagtgctccaattatgtacttgcagattctataaaaggattgtttcaaaactgatgaataaaaagaaaggatcaattctgtgaaatgaatggacacatcacaaagaagtttctcagaatgcttctgtgtagtttttatttgaaggtatttccttttccaccataggccgcaaagggctccaaatatccaactgcagattccaaaaaaaaggagattcaatactgctcaatcaaaagaaaggttcaactctgtgaattgaatgcacacatcacaaagaagtttatcagaatgcttctgtgtagcttttatgttaagatatttccttttccacaatagggctgatatcgctccaaatatccacttgcagactctacaaaaacagtgtttcataactgctccatcaaaataaagaatcaactctgtgaggtgaatgcacacatcacaaagaagtttctctgaatgcttctgtgtagtgtttatgtgaacatatttgcttttccacaatagaccccaaagtgctccaaatatccacatgctgatttctacaaaaagagtgtttcaaaactgctcaatcataaggtaggttcgtcctgtgagatgaatgcacacatcaaaacgaagtttctcagaatgcttctgtgtagtttttatttgaacatatttccttttccaccataggccacaaagggctccaaatatccactcacagattctacaaaaaaagagattcaaaactgtttaatcaaaagctaggttcaactctgtcagttgaatgcacacatcacaaagaagtttctcagaatgcttctgtgtagtttttacatgaagatatttccttttccccaataggcctcaaagctctccaaatatccacttgcagattctgcaaaaagagattcaaaacttctccatcaaaagagaggttcgactgtcagtggaatgcacacatcacaaagtagtttctcagaacgcttctgtgtagtttgtatgtgaagatatttccttttcaatcataaagcacaaagggctccaaatatcaagttgcagattgtaccaaaagagagtttaaaaatggctcaatcaaaacataggttcaactctgtgagttgaatgcacacgtcacaaatagtttctcagaatgattttgtgtagtttttaggtgaagatatttgcgattccacagtaggcctcaaagcgttccaaatatccatttgctcattaaacaaaaagagtgtatcaaaactgctcaatcataagataggttcaaccctgtgagatgaatgcacacatcacaaataactttctcagaatgcttctgtgtagtttttatgtgaagatatttccttttccaccgcaggccacaaagggctccaaatatcaacttgaagattctacaaaaagagagattcaaaactgctccatcaagagataagttcaactctgtgagttgaatggacacatcgcaaagaattttctcataatgcttctgtgtagtttttatttgaagatacttccttttccacaataggcctcaaagctctccaactatgcccttgcagattctacaaaaagagagattcaaaactgctcaatcaatagagtggtttgactctgtgcgttgaatgcacacctcacagagaagtttctcagaatgcttctgtgtagtttgtatttgaagatatttgcttttccacagtaggcctgaaagctctccaaatatccacttgcagattctgccaaaagagagattcaaaactgctcaatccaaagataggttcaactctttgagttgaatacacacatcacaaagaagtttttcagaatgcttctgtgtagttattatctgaagatatttccttttccacagaagacctcagaggtctttaatatctacttgcagattctgcaaaaagagtgattcaaaacagctcaatcaaaagatattttcgactctgtgagttgaatgcacacctaacaaaaaagattctcacaatgcttctgtgtaatttttaggcgtagatgtttgctttccctcattaggcctcaaaaagttccaaatatccacttgcagattctgcaaaaagagagattcaaaactgctcattcaagagataggttcaaatctgtgagttgactgcacacctcacaaagaagtttctcagaatgcttctgggtagtggagtggagaaaagtggagtggattggagtggtaaggattggaatgcaatggagtggagtggaatggaatggaatggaacagaatggaatggaatggagtggaacagagtggagtagaggggagtggaatggagttgagtggagtgtatcagagtgcagtggaatggaaaggaatggaatggattggaatggattggagtggagtggagtggaatggagtgaaatagagtggagtggaatgaagtggaatggaatggaatggagttgaatgtaacggaatggagcagaaaggaatggaacggaacttaaaggaatctagtggagtggagtggagtggagttgatcagagtgcagtggaattgaatggaatggactggaatggaatagagtggagtggaggggagtggtaagaagttgaatagagtggaatgaaatagagtggagtggaatggtatggaatggaatggaatggaatggaatggaaaggaatggaaaggaagagaatggaatggaattgaaaggagcagagtggagtggaatggagttgattggaggggatcggagtggaggggaatggaatggaatggaatgaaatagaatggaatttaggggagtggcgtggggtggattgagtggagttgagtgcagtagtgtggaatggagtggaatggaatgtagtggagtggaatggaatggaaaggaacagaaaggaatggaatggaatggaatggaatggaatggaatggaatggaatggaacagagtggagtctaatggagtgaaatggagtggagtggagtggagcggaatgaaatggagtggaatggaacagaatggaactgaccagaacggaatggaatcgaatggagtggagtggagttgagtggagtggatcggagtgcagtggaatgaaatggaatggaatggaatggaatgtattggagtggattctagtggagtggagtgtagttgaatggagtggaatgaaatgcagtggagtggaatggaatggaatggagtggaatggaatagaatagaacggaatggaatggaatgaaaaggaatggagtggagtggagttgactggaatggattggattgccatggaaaggaaaggaaaggaatggaatggaatggaatggaatggaaaggagtgtagtggaatggagtggagtggagtgcagtggattggagtggaatggagtggagtggagtgcagtggagtggaaaggagtggagtggtgtggaatggaatggagtggaatggaacggaacacaaacatgaacagagtggaaaggaatggaacggagtggagttgagtggagtagagttgagtggaatggatgggaatgctttggaatggaatggaaaataatttaatgaaatttagttgagtggagtggattttattggagtggagtggaatggaatggattagagtttagagcagtggcgtggagtggagtggaatggagtggaatggagtggaatgaaatggagtggagtggagttgagtggagtggatgggatagcagtggaatggaatggaatgaaatgcaaattgaatgaaatggagtggaatcatgcaatgaaatgtgagctaagattgtgccactgcactctagtctgggagacagagtgagatatagtcgaagtaaaagaatggattgaaatgcagtagaatataatggaatggagtggagtggaatggaatgaagtggaatagaatggagtggagtggaatggaggggagtggattggagtggagtggaatggagtggaatggaatgaaatggagtggagtggagtggaaggaatagagtggaatgaagtggagtggaatgaagtggaggggagtgagtggaatggggtgcagtggaatggaatggagtggactggagtggaagggagtggaatgaattggaatggaatggattggaatggaatgaatggagtggaatggagtggagtgtattggagtggattgtagtggagggaagtggaatggagtagaatggagtggaatggagtggagtggagtggagtggaatggaatggagtttaatggaatggaaaggaacgtaccagaacagaatggaatggaacggaatagaatggagtggaatggagtggaattgtgtggagtggatcggagtgcagtggaatggaatggaatggaatggaatggaatggaatggagtggagtggggtggagtggataggagtggaatggaatggagtggtgttgagtaaactggaatagagtggaatggaatggagtggattggaatgcaatggaaaggaacagaatggaatgaatggaacagaatggtatagaacggacggaaaggagtggagtggaatggagttgagtggagtggatcggattgctgtggaatggaaaggaatggaatggaatggaatggaaaggaatgtagtggaatggagtggagtggagtggaatggagaggagtggaatggagtggagtggaatggagtggggtggagtggagtgcagtggagtggagtgcagtggagtggaatgtagtggtttggagtgtaatggaatggagtggaatgcaacgtaacagaggagaatgcaacagaatggaatggaatggagtggagtggagtagagttgagtggagtggatcggactgcagtgtaatggagtggaatggaatttaaagtaatcgagtggactggagtggagtggagtttagtggagtgcggtagaatagttgtctattaggtccgcttggtgcagagctgagttcaattgctgggtatccttgttgactttctgtcttgttgatctgtctaatgttgacagtggggtgttaaagtctcccattattaatgtgtgggagtctaagtctctttgtaggtcactaagcacttgctttatgaatctgggtgctcctgtattgagtgcatatatatttaggatagttagctcttcttgttgaattgatccctttgccattatgtaatggccttctttgtctcttttgatctttggtggtttaaagtctgttttatcagagactaggattgcaacccctgcctttttttgttttccatttgcttggtagatcttcctccattcttttattttgagcctatgtgtgtctctgcacgtgagatgggtttcctgaatagagcacactgatgggtcttgactctttatccaatttgccagtctgtgtcttttaattggagcatttagtccatttacatttaaagttaatattgttatgtgtgaatttgatcctgtcatgatgatgttagctggtgattttgctcgttagttgatgcagtttcttcctagtctcgatggtctttacattttggcataattttgcagcggctggtgccggttgttcctttcgatgtttagtgctttcttcaggagctcttttcgggcaggcctgctggtgacacaatctctcaacatttgattgtctgtaaagtattttatttttccttcacttatgaagcttagtttggctgggtatgaaattctgggttgaaaattcttgtctttaagaatgttgaatattggcccccactctcttctggcttgtagggtttctgccgagagatccactgttagtctgatggcttctctttgagggtaacccgacctttctctctggctgcccttaacattttttccttcatttcagctttggtgaatctgacaatgatgtgtcttggagttgctcttctcgaggagtatctttgtggcgttctctgtatttcctgaatctgaacgttggactgccttgctagattggggaagttctcctggataatatcctgcagagtgttttccaacttggttccattctccccatcactttcaggtacaccaatcatacgtagatttggtcttttcacatagtcccatatttcttggaggctttgctcatttctttttattcttttttctctaaacttcccttctaacttcatttcattcatttcatcttccatcgctgatactctttcttccagttgatcgcatcggctcctgaggcttctgcattcttcacgtagttcttgagccttggttttcagctccatcagctcctttaagcacttcactgtattggttattctagttctacatttttctaaatttttttcaaagttttcaacttgtttgcctttggtttgaatgtccttccgtagctcagaataatttcatcatctgaagccttcttctctcagctcatcaaagtcattctccatccagctttgttccgttgctggtgaggaactgcgttcctttggaggaggagaggcactctgctttttagagtttccagtttttctgctctgttttttccccatctttgtggttttatctacttttggtccttgatgacggtgatgtacagatgggtttttgttgtggatgtcctttctgtttgttagttttccttctaacagacaggaccctcagctgcaggtctgttccagttttgaacattctttttgtagaatctgcaagtggacatttggagtgcattgcaacctatggtagcaaaggaaatatcttcacataaaatctagaaagaagcaacctgagaaacttctttgtgatgtgtgcattcatgtcacagagttaaacatttcttttgatggagaagttttgaaactatctttttgtagatctagcaattggacatttggagcactttgaggcctatggtggaaaaggaaataccttcacataaaaactagagagaagaattctgagaaacttctttgtgattcatacgttcatctcacagatttgaacctttcttttgatggagcagttttgaaactctctttttgtagaatgtgcaagtggacgtttggagcgctttgaagcctatggtgtaaaaggaaatatcttcacataaaaaccagatagaagctttctgagaaacttctttgtgatatgtgcattcgtgtccctgacttgagcatttcttttgaaggaccagttttcaaatactgtttttgtagaatctgcaagtggacaattcgagtgtcttgaggcctatggtggaaaagaaaatatcttcacataaaaactggacagaagaattctgagaaacctctttgtgatgtgtacattcgtatctcaaagtttaatctttcttctgaaggaccagttttgaaatcctctttttgaagaatccgctagcagacatattgtacgccttgaggcgtatgctggaaaaggaaatatcttcacataaaatctagacagaagcaatctgagaaacttccttgtaatgtgttcatttatctcacagagttaaaccttttttttgattgagcagtcttgaaactctctttttgtagaatctgtaagtggacattttgtgtgttttgaagcctatggtggaaaaggaaatatcttcacataaaaatcagatagaaacattctgagaaacatctttgtgatgtgtacattcatctcacagagttaaacctgtcttttgatagagcagttttgaaactctcttttgtggaaactgcaagtggacatttcgagcaccttgagtcctatggtggaaaatgtaatatcttcacacaaatattagatagaataattctgagaaacttctttgtgatgtgtgcattcacctcaaagagttgaaccattcttttgattgaggagtttggaaacactctttttgtagtatctgcaggtggacatttggaaagctttttggcctatgatagagaaggaaatatcttcacataaaatctagacagaagaaatctgagaaacttcctcgtgatgtgtgcattcatctcatagagttaaaactttcttttgattgagaagttttgaaactctcttttttaagtctgcaagtggacatttggagcagtttgaggcctgtggtggaaaaggaaatatcttcacataaaaactaaacagaagaattctgagatagtttttgtgatgtgtgtgttcacctcacagagttgaaccattcttttgaatgagcagtttggaaacactcttgtagaatctgcaagtggatatttggagtgctttgcggcctatggtagaaaaggaaatatcttcacataaaatctagacagaagaaatctgagaaacctcttcatgatgtgtgcattcatacccagagtttaagctttcttttgatgggtcagttttggaatactctttttgttggatctgcaagtggacattttgaacaccttgaggcctatggtggaaaatgaaatatcttcacgtaaaaactaaacagaagaattctgagaaacttctttgtgatgcgtgcgttcacctcacagagttgaacatttcttttgattgagcagtttggaaacactctttttgtagaatctgcaagtggacattcagagggctttgtggcctatggtagaaaaggaaatatcttcacataaaatctcgacagaagcaacctgagaaacttatttgtgatgtgtgcattcatcacacagagttaaaacctttttttaattgagcagttttgaaactctctttttgtagaatctggacgtagacaagtgcagcattttcaggcctatggtggaaaaggaaatatcttcacataaaaactagacagaagaaatctgagaaacttccttgtgatgtgtctgttcatctcacagagttgaaactttcttttcattgagcagtttggaaacatgctttttgtagaatctgcaagtggacattcagagggctttgtggcctatggtagaaaaggaaatatcttcacataaaatctagacagaagcaatctgagaaaattctttctgatgtgtgcattcatctcacagagttaaacctttcttttgattgagcagttttgaaactctttttgtggaatctgcaagtggacatttggagtgcttttcggcctatgataaaaaaagaaatatcttcacataaaatctagacagaagccatctgagaaacttctttgtgatgtctgcattcatctcatagagttaaaattttctttgaatgagcactttcgaaactctcttttgtagaatctgcaagtggacatttggagtgctttgagacctatgataggaaaggatatatcttcacataaaatctagacagaagcaatttgagaaacttcaccatgatgtatgtattcaagtcacagagttaaacctttctttttaattgagcagtttttttttgtttgtttgtttgtttttttagaatctgttagtggacgtttaaggcgctttgaggcctatgaaggaaatggaaatatcttcacctaaaaactaaacagatttctgagaaacttctttttgatgtgtacgttcatctcacagagttgaacctttcttttattgagcagtttggaaacactcttttcgcagaatctgcaagagtatatttggagagttttgaggcctatggaggaaaagaaatatcttcagataaaaactaattagaaccattctgagaaacttctttgtgatgagtgcattcatgtcccagagttcaacatttcttttgatgggccagtattgaaataatctttttgtggaatctgcaagtggacatttggaacgccttgaggcctatggtggaaaatgaaatatcttcacataataactagacagaataattccaggaaacttcaattgtgatgtgtacattcatctcacagagctgaacctttcttttgattgagaagtttggaaacactcttttggcgaatctgcaagtggaaaatttgtatgctttgcagtcaatggtagaaaaagaataatcttcaattaaaatctacacggaagcaatctgagaaacttctttgtgatatgtgcattcatctcacagagttaaacctttattttgactgagcagttttgaactctctttttatataatctgcaagtggacgtttgaacagatatgaggcctacggtggaaaaggaaatatcttcacataaaaactagaaagaagaattctgagaaccttctttgtgatgcatgtgttcatctcacagatttgaacctttgtttggattgagtagtttggaaacactctttttgtaaaatctgcaagtggacatttggagcactttgcggcctaaggtagaaaacaaatatcttcacataaaatttagacagaagcaatctgagaaacttctttgtgatgagtgcattcatctcacagagttaaacctttctttggattgagcagttttgaaattctctttttgtagaatctgcaatgaacatttggtgggctttgaggcctttggtggaaaagaaaatatctttatattaaatttagacagaagaattctgagaaactgttttgtgatgtgtgctttcatctcacagagttgaatctttcttttgattgagcagtttggaaacaatcatttgtaggatctgcaaatggccatttggagtgctttgcggcctgtggtagaaaaggaaatatcttcacataaaatctagaaggaagcaatctgagaaacttctttctgatgtgtgcattcatgtcacagagttaaaactttctttatattgagcagttttgaacctctctttttgtagaatctgcaagtggatgtttagagcgatttgatacctatggtggaaaagaaaatatcttcacaaaaaaactagacagaagaaatctgaaaaactactggtgatgtttgcgttcatctcacagagttcaaagtttcttttgatggagcattttggaaacactcattttctagaatcttcaggtggacattaggagggctttgaggcctatggtgaaaaaggaaatatcttcacatgaaaactagagagaagaattctgtgaaagttcttttgttgtgggctttcatctcacccagatgaaccttcttttgattgagcagtttggagactctccttctttagaatctgtaagtggatatttggagacctttgtggcctatggcagaaaaggaagtatcttcatataaatctctgccgcagcaacctgagaaacttctttgtgatgtgtgcattcctctgacagagttgaacctttcttttgattgagcagttttgcaactctctttttgtagaatctgcaagtggacattttgagggctttgaggactaaggtggaaaaggaaatatcttcacataaaaactagacagaagaactctgaaaaacttctttgtgatatgtgcgttcatctcacagagttgaaactttcttttgattcagcagtttggaaacactcttttcgtagaatctgccagtggacatttggagtgcttggcggcctatagtagaaagggaaatatcttcatcttaagtctagacagaagcaatctgagaaacttctttgtgaagtgtgcattcatctccaagagctgaaccttccttttgatgtatcagttttgaaatactctttttgtagaatctgcaagtggacatttggaacgccttggggccaatggtagaaaagggtatatcttcatttaaaatctagacagaagcaatatgagaaacttctttgtgatgtaggcattcatctgacagagttaaacctttcttttgattgagcagtttggaaactctctttttgtagaacctgcaagtggacatttggagcactttgagtcctatgatggaaaaagaaatattctcacataaaaactagacagaataattctgagaaacttctttttgatgcgtgtgttcatctcaaagagttgagcctttcttttgattgaggagtttggaaacactttatcttgtagaatctgcaagtggacatttggagcgttttgcagcctatggtagaaaaggaaatatctacacataaaatctagacagaagctatctgaaaatcttctttgtgatgcgtgcattcatattccagagtaaagcctttcttttgattcagcagttttgaaactctctttttgtgtaatctggaagtggacatttggagggctttgaggccgatggtggaaaaggaaatatcttcaaaaataaactagacataagcattctgaataacttcttcatgatgtgtgcattcatctcccagagttgaagctttcttttaatggaccagttttgaaatactctttttgtagaatctgcaagtggacatttcgagcaccctgaggcctatagagggaaaagaaatactttcagataaaaatgagacagaagaattctgagaaacttctttgtgatttgtgcgttcatatcacacaggtgaaactttcttttgattgagcagtttggaaacactctttttgtagaatctgccaatggacatttggtgtgctttgaggcttatggtagaaaaggaaatctcttcacagaaaatccagacagaagcaatctgagaaacttctttgtgatgtgtgcattcatctcacagagtgaaaccttacttttgatggagtagttttgaaattctctttttgtagaatctgcaaattgacattgggagtgctttgaggcctacagtggaaaaggaaatatgttcacataaaaactagacagaagcattctgagaaacttctttgtgatgtgtgcattcatctcaaagagttgaaactttcttttgatggaccaggtttgaaatactccttttgtagaatctgccagggggcatttcgagcaccttgaggcctaaggtgaaagtgaaatatcttcatataaaatcttgactgaagcaatcttagaaacttctctgtgatgtgtgcattcatctcactaagtgaaacctttcttttgattgagcagttttgaaactctctttttgttgaatctgcagttggacacttggagcgctttgaggcctaagatggaaaaggaaatatcttcacataaaaactagacagaagaattctgagaaacttctttgtaatgtgtgcgttcatttcacagagttgaacctttcttttgattgagcagttttgaaacactcttattgtagaatctgcatgtggacatttggagcactttgtggcctatggtagaaaaggaaatatcttcacataaaatctagacagaagcaatctgagaaaattctttgtgatgtgtgcattcaccttacagagtaaaacctttcttttgattgagcacttttaaaactctctttttgtaggatctgcaagtggacatttgtagcaccttgaggcctatgatggaaaaggaaatatcttcacttaaaaaataaacagaagaattctgagaaacttcttttttatatgtgtgttcatctcacagagttgaacctttgattgagcagtttggaaactctctttttgtagaatctgcaagtggacatttggagtgttttgtagcctatggtagaaagggaaatatctttacatacaatctagacagaagtaatctgagaatcttctctgtgatgtgtgcattcatctcacagagttaagccttattatgattgagcacttttgaaactctctttttgtagaatctgcaattggacatttggaaggctttggggcctatggtggaaaaggaaatatcttcacataaaaacaagatagaagcgttctgagaaacttctttgtgatgtgtgcatccatctcccagagttgaacctttctttggatggaccagttttgaaatactgtttttgtaggatctgcaagtggacattttgagcgccttgaggcctacggtggaaaaggaaatatcttcacatagaaactagacagaagcattctgagaaacctctttgtgatgtgtgcattcatctcaaggaggtgaaactttcttttgatggaccaggttcgaaattctccttttgtagaatctgccagggggcattttgagtgccttgaggcctatggtggaaaatgaaatatcttcatataaaaactagacagaagcattctgagaaagttctttgtgatgtgtgcattcatctcacagagttgaatctttcttttgattgagaagtttggaaacactgtttttgtagaatctgcaaggggcagttggaacgcttattgttctatggtggaaaaggaaataacttcatataaaatctagacagaagcaatctgagaaactttttgtgatgtgtgctttcatctcacagacttaaaccttccttttgattgagcagctttagaaatctctttttgcagaatctgcaagtggacatttggaatgcttttaggcctatggaagaaaaggaattatcttcacataaaaactagccagaagaattctgagagaattctttgtgatgtgtgcattcatctggcagagttgaacctttcttttgattgagcagtttggaaacactctttttgtagaacctgcaagtggacatttggagcactttgcggcctatggtagaaaaggaaatatcttcacaaaaaatctagacagaaccattctgagaaacgactttttcttgtgtgcattcatctcacagagttaaccatttcttttgattgagcatttttgaaactctatttttgtagaatctgcaagtggacatttggagcactttgaggcctatggtgtaaaaggaaataccttcacataaaaactagatagaagcattcagagaaacttctttgtgatgtgtgcaatcatttcccagagttaaacctttttttctgatggaccaattatgaaatagtctttttgtagaatttgcagttggacatttcgagcaccttgaggactatggtggaaaatgaaatatcttcacataaaaactagacacaagtattctgagcaacttctatgtgatgtgtgcattcatctcacagagttggacctttcttttgattgagaagtttgtaaaccctctatttggagaatctgcaagtgtacatttggagtgctttgccacctattgtagaaaaggaactatcttcacataaaatctagacataagcaatcagagaaactactttgtgttttgtgcatgcccctgagagagttaaacctttcttttgattgaggagttttgaaactctctttttgtagaatccgcaagtcgatatttggagggcattaaggcctctggtggaaaaggaaatatcttcacataaaaactaaacagaagaattctgagaaacttctttgtgatgcgtgcattcatcttacagaggtgaacctcttttttgattgagctgtttggaaacattctttttgtggaatctacaagtggatatttggaacgctttggggcctgtggtagaaaaggaaatatcttcacataaaatctagacagaatcaacctgacaaacttccttgtgacgtgtgcttttgtctaagagagttaaacctttcttttgatggaggagttttgaaactctccttttgtaaaatctgcaagtggatatttggagtgctttgaggcctatggtggaaaaggaaatatcttcacataaaaactagacagaagagttctgagaaacttctttgtgatgtgtgcgttcatctcacagtgttcaaagtttcttttcatggagcaatttggaaacactctttttgtagaatcttcaagtggacatttggagggctttgaggcctctggtggaaaagcaaatatcttcacatgaaaactggagagaagaattctgtgaaacttttttctgatacatgcgtccatctcacacagatgaaccttccttttgattgggcagtttggagacactctttctgtagaatctgcaagtggacgtttggagccctttgtgatcaatggtagaaaaggaagtatcttcatataaatctctgccaaaacaaccagataaacttctttgtgatgtgtacattcatctcacagagttgaacctttcttttgattgagcagttttgaaacactctttttgtagaatgtgcaagtggatatttggagctctttgtggcctatggtagaaaaggaaatatcttcacataaaaattacaaagaagcattctgatagacatgtttgtgttgagtgcattcagctcacagaattgaacctatgttttgattgagtgcgtttgaaacactctttgtagaatctgcaagtggatatttggatcgatttgacgcctattgtggaaaaggaaatatcttcacataaaacctacacagcagcattctgagaaacttctttgttttgtgtgcattcaactcatggagtcaaacctatcttttgattgagcagttttgaatctctctttttgcataatctgtgagtggatatttggagagatttgaggcctattgtggaaaaggaaatatcttcacagcgaaactacacagaagcattctgagaaacttcatggtgatgtgtgcgttcatctcacagagatgaatctttcttttcatttagcagttttgaaacactctgtataatctacaagcggatagttggagtgctttgaggcctattgttgaaaagaaaatatcttgaaatgaaatctacacagaagcattccgagaaacctctttgtgatgtgtgcattcatctcacagagttgaacctttcttttgattgagcagttttgaaaaactctttatgtggaatctgcaagttgatatttggagcgcttagattcctattgtggaaaaggaaatatctttacataaaaactgcatagaatcattctgagaaacttctgtgtgatgtgtgcattcatctcacaatgttgaacctttcttttcattcagcagttttgaatctttctgtttgtagaatctgcaagtggatatatggagagctttgaggcctatggtggaaatggaaatatcttcacataaaaactacacagaagtattctgagaaacacctttgttaagtgtgcattaaactcacagagttgaaactttcttttgattgagcagttttgaatctctcttttggtagaatctacaagaggatatttggagccattttcagcctatggtggaaaaggaaataccttcacataaaaactacaaaaaagatttctgaggaacttctatgtcatgtgtgccttcatctcacagagttgaacctttcttttgatttagcagtttggaaacactctttttgttgtatctacaagtgactgtttggaccactttgaagcctatggtggaaaaggaaatatctttaaataaaaactacacagaagcattctgagaaacttctttgtgatgtgtgctttcatctcacattattgaacctatcttatgattgggcagttttgaaacactctttttatagaatctgcaagtgtatatttggagccgatgtggcctatggtgaaaagggaaatatcttcacataaaaactacacagaagcattctgagaaaccactttgtgatatgtgcattaaactcacagagttgaatctatcttttcattgagcagttttgattccctctttttgtaggatttgcaagtggtcatatggagccctttgcggcctatggaggaaaaggaaatatcttcaaataaaaactacccagaagcattctgaggaacttctttgctatgtgtgcattcaactcacagagttgaaactatcttatgattcagcagttttgaagcactgtttttgtagagtcttcaagtggatatttggagcactttgaggcctactgtggaaaagcaaatatcttcacataaaaactgcacagaagcattctgagaaacttctttgtgatgtgtgcattcaactcacagaatcgaacctatattttgatggagcagtttttaatctctctttttgcagaatctgcaagtggatatttggaggcctttgaagcgtagtgtggaaaaggaaatatcttcacataacaactacacagaagcattctgagaaactttttgtgatgtgtgcattcaactcacagagttgaacctatgttttgattgaacagttttgaatcactctttttgtagaatctgagagtgaatatttgcagtgcttttaggtctattgtggaaaaggaaatattttcacataaaaactacacagaagctttctgagaaatttctttgttatgagtgcattcatcacacatagttgaacctttctttttgattgaacagttttgtaacactctttatgtagaaactgcaagtggatatttggagggctttgaggcctattttggaaaaggaaatatcttcatatcaaaactacacagaagcattctgagaaacttctttgtgatgtgtacattcaactcacagtgttgaaactatcttttgatagagcagttttgaaacactctttttgtagaatctgcaagtgtatatttggaaagctttgaggccttctgtggaaaaggaaatatcttcatgtaaaaactacacttaggcagtctgagaaacttctttatgatgtgtgcattcatcatacagattttaacttcttttgattgagcagatttgaaacactctttttgtagaatcagcaggtagatatttggagggttttgaggcctattttggaaaaggaaatatcttcacataaaaactacacagaagcattctgagaaacatctttgtgatgtgtgcattcaactcacagagttgaaccaatgtcttagtggagcagttttgaatctttttgtggaatcttcaaccggatatttggagcccttatcagcctatggtggaaaaggaaatatctttaaataaactgtacacggaggaattgtgagaaatttctttgtgatgtgtgaactcatctcacagagttgaaatttccttttgattgagcagttttgaaatgctgttttcatagaatctgcaagtggatatttggagcgctttgaggcctattgtggaaaaggaaatatcttcacataaaaactacacagaagcattctgaaaaactactttgtgatgtgtgcattcatctcacagtgttgaaattttcttttgattgagcaattctgaaatgctgttttcatagaatctgcaagtggatattcagagcgctttgaagcctactgtggaagaacaaatatcttcacataagaactgcactgaggcattctgagaaacttcttcatgatgtgtgcattcaactcacatagttgaacctatcttttgattgggcagtattggatctctcttcgtagaatctgcaattggatatttggtgccctttgtggcctatgaatgaaaaggaaatatcttaaaagaaaaggtacacagaagcattcagagaaacttcttcatgatgtgtgcattcatctcacagaggtgaacctttcatttgattgagcagttttgaaacactctctttgtagaatctgtaagtggatacttggagccttttgaggcctactgtggaaaaggaaatatcttcacataaaaactacacagaagatttctgggaagcttccctgggatatgtgcattcctctcacagagttgaacatttcttttgattgagcagtttggaaacactctttttgaaccgtctgcaagtggatatttggagtaattgaggcctactctgaagaagaaaatatcttcacataaaatcaacacagaggcattctgagaaacttctttgagatgtgtgccttcatctcacagagttgaacatttcttttgattgagcagttttgaaacaatctttttgtaggatctgcaagcagatatttggagccctttgtggcctaaagtggaaaaggaaatatcttcaaataaaaactacacagaagcattctgaggaacttctttgttatgtgtgcattcaactcacagagttgaacttatcttatgattcagcagttttgaaacactgtttttgtagaatcttcaaatggatatttggagcgttttgaggcctactgtggaaaagcaaatatcttcacataaaaacttcacagaagaattctgggaaacttctttgtgatgtctgcattcatctcacacagctgaacctgtcttatgatagagcagtattgaaacaatctttttgtagaatccacaagtggatatttggagtgttttgagacctattttggaaaacaaaatatcttaacataaaaactacacaaaagtaccctgataaacttatttgtgatgtgtgcatttatctcagagatttgaaactatcttatgatttagcagttatgaaacactctatttgtagaatctgcaagtggatatttggggccttttgaggactattgtggaaaaggaaatatcttcacataaaaacaacacagaagcattctgagaaacttctttgtgatgggtgcattcatctcacagggttgaacctattttataattcagcagttttgaaatactctatttgtagaatatgcaagtggatatttggagcgctttgaggccaacagttgaacagcaaatatatttacataaaaactacacagaagcattctgagaaacttctttgtgatgtgttcattcatcttacagagttgaacctttcttttgattgagcagttttgaaacactctttgtgtagaatctgcatttggatatttggagaactttgatgcatattgtggaaaaggaaatatcttcaaataaaaactacacagtagcattctgataaacttctttgtgaattgtgaattcctctcacagagtttaacctatgttttgtttgagcagtttttaatctctttttgtagaatctgaaagtggatatacagagtgctttgaggcctattgtggaaaaggaaatatcttcacataaaaatttcacagaagcattctgagaaactactgtgtgatgagtgtattcatcacacaggatgaacgtgtcttttgattgagcagttttgaaacacactttttgtagaatctgcaagtggatatttggagggctttgaggcctgttttgaaaaaggaaatatcttcacataaaaactgcacagaagcattctgagaaaattctttgtgatgtgtgctttcatcccacagagttgaatctttttttgattgagcagtattgaaacactgtttttgtgtattctgcaagtggatatttggaacgctttgaggcctattgtggaaaagaaaatatcttcacttcaagaccacacagaagcattctgagaaacttctttgtgatgtgtacattcaactcactgatgtgaatctatcttttgattagcagttttgaaactctctttttgtagtatctgcagttgtatatttggagccctttgagacctatgatggaaaaagaaatgccttcatatgaaaactacacagaagtattctgagaaactcctttgtgatgtgtgcattcaactcacagatttgaacctatcatttgattgagccattttgaaactgtctttttctattatctgcaagtgaatatttctagccttttgtggcctattttggaaaaggacatgccttcacataaaaaacaaacagaagtattctgagaaacttctttgtgatgtgagcattcatctcacagagatgaacctttcttttgattgagcagttttgaaagaatctttttgaagtatctgcaagtgaatatttggagcactttgaggcctaatgtgtggaagaaatatcttcacataaaaactacatagaagctttctgagaaacttctctgtgttgtgtgcattcaactcatggagttgaacctattttttcattgaacagttttgaaactctttttgtagaatctgcaagtggatatttggagccatttgtggcctatggtggaaatgggaatatcttcaactaaaaactacacagaagcattctgagaaacttcgtggtgatgtgtgcattcatctcacagagatgaatctttctttttcatttagcagtttttaaacactctgtttgtagaatctgcaagtggataattggagcactttgaggcaaatagttgaaaagaaaatatcttcacatgaaatctacacagaagcattccgagaaacctcttcgtgaagtgtgctttcatctcacagagttgaacctttcttttgattgagcagttttgaaaaactctttttgtagaatctgcaagttgatatttggagcgcttaggttcctattgtggaaaaggaaatatcttcacataaaagctgcacagaatcattctaagaaagttctgtgtgatgtgtgcattcatctcacagtgttaaacttttcttttcattcagcagttttgaaactttctttttgtagaatctgcaggtggatatttggagctctttgaggcctatggtggaaatggaaatatcttcacataaaaactacacagaagcattatgagaaacatctttgttatcacagaagcattctgagaagcatatttgttaagtgtgcattaaactaacagagttgaaactatctttcgattgagcagttttgaatctcactttttgtagaatctgcaagaggatatttggagccctttgcggcctacagtggaaaaggacataccttcacataaaaactacaaaaaagatttctgaggacattctttgtcatgtgtgccttcatctcacggagttgaacctttcttttgattgagcagtttggaaacactttttttgtagtatctaaagtggatgattggatcgctttgaggcctatggtggaaaaggaaatatcttcacatgagaactacacagaagcattctgagaaacttctctgcaatgtgtgcattcaactcacaagtttgaacctatcttttgattcagcaattttgaaactctctttttgtagaatccgcaagtggatatttggaactatttgctacctattgtggaaaaggagatatcttcacataaaaactacagagaagcattctgagaaacttctttgtgatttgtgcattcatctcacagagttgaacctttcttttgattaagcagttatgaaacagtctttttaaaggatcagcaagtggatatttggaggacttttaggcctattgtgtaaaaggagatatcttcacataaaaactaagcagaaccattctgagaaactactttgcaatgtgtgcattcatctcacagagttgaaactttcttttgattgagcagtttggaaacactcactttgtagaatctgcaagtggatatttggagcgctttgtggcctatggtggaaatgggtataccttcacataaaaactatgtggaagtattcagagaaacttctttctgatgtgtgcatacaactcacagagttgaaactttcgtttggttgaacagttttgaaactctctttttgtagaatctgcaagtggatatttggagccctttgtggcctatggtggaaagggaaatattttcacataaaaactacacagaagccaactggcaaatgaggtggcagtcaagatggccaaataggaacagctctgttctacagctcccagcatgagtgacacagaagatgaatgatttcctcatttccatctgagatacctggttcatctcactagggagtgccagacagttggcgcaggatagtgggtgcagtgcaccatgtgtgggcagaagcagagtgaggcatttcctcacttgggaagtgcaagtggttagggagttccctttcctagtcaaataaaggggtgacagacggcacctgggaaatccagtcactcccacactaatactgtactttttcaatgggcttaaaaaatggcgcaccaggagattatatcccacaccttgcttggagggtcctatgtccacggtgtctcactgattgctagcacagcagtctgtgatcaaactaaaaggtggcagtgaagctgggggtggggcaccccccattgcccaggcttgcttaggtaaacaaagctgctggaaagctcgaagtaggtgtagcccaccacagctctaggagacctgccttcctctgtaggctccacctctgggggcagggcacagacaaacaaaaagacagcagtaacctctgcagacttaaatgtccctgtctgacagctttgaagagagcagtggttctcccagcacacagctggagatctgagaatgggcagactgcctcctcaagtgggtacctgacccctggaccccgagcagcctaactgggagacacccctcagtagggacagactgacacctcacatggccgggtagtcctctgagacaaaatttccagagcaaagatcagacagcagcattcgtggttcatgaaaatccgctgttctgcagtcaccgctgctgatacccaggcaaacaggatctggagtggacctccagcaaactccaacagacctgcagctgagggtcctgtctgttagaaggaaaactaacaaacagaaaggacatccacaccaaaaacccatctgtatatcaccaccataaaagaccaaaattagataaaaccacaatcatggggaaaaaacagagcagaaaaactagaaactctaaaaacagagtgcctctcctcctccaaaggaatgcagttcctcataagaaatggaacaaagctggacggagaatgactttgacgagttgagagaagaaggcttcagacaatcaaattactcagagctacaggaggaaattcaaaccaaaggcaaagaagttaaaaacattgaaaaaatttagacgaatgtataactagaataaccaacacagagaagtgcttaaaggagctgatggaggtgaaagccaaggctccagaactacatgaagaatgcagaagcctcaggagcagatgcgatcaactggaagaaaaggtatcagtgatggaagttgaaataaatgaaataaagtgagaagggaagtttagagaaaaaagaataaaaagaaatgaacaaagactgcaagaaatatgggactatgtgaaaagaccaaatctacgtctgattggtgtacctgaaagtgatgtggagaatggaaccaagttggaaaacactctgcaggatattatccaggagaacttccccaatctatcaaggcaggccaacattcagattcagaaaatacagagaatgccacaaagatactcctcgagaagagcaactccaagacaaataattgtcagattcaccaaagttgaaataaaggaaaaaatgttaagggcagccagagagaaaggtggtgttaccctcaaagggaagcccatcagactaacagcagatctcttggcagaaactctacaagccagatgagagtgtgggccaatattcaacatttttaaagaaaagaattttcaacccagaatttcatatccagccaaagtaagcttcataagtgaaggagaaataaaatactttacagacaatcaaatgctgagagattgtgtcaccaccaggcctgccctaaaagagctcctgaaggaagcactaaacatggaaagaaacaaccagtaccagccagtgcaaaatcatgccaaattgtaaagtccactgtggctagtaagaaactgcatcaactaacgagcaaaataaccaaaaaacatcataacgacaggatcaaattcacacataacaatattaactctaaatgtaaatggactaaatgctccaattaaacacacagactggcaatttggataaagagtcaagacccatcaatgtgctgtattcaggaaacccatctcacatgcagaaacaaacataggctcaaaatgaaaggatggtggaagatctaccaagtaaatggaaaacaaaaaaaggcaggggttgcaatcctagtctctgataaaacagactttaaatcaacaaagatcaaaagagacaaagaaggccattacataatagtaaagggatcaattcaacaagaagagctaactatcctaaatatatatgcactcaacacaggagcacccagattgttaaagaaagtcctgagtgatgtacaaagagacttagactcccacacaataataagtggataatataacaccccactgtcaatattagacagatcaacgagacaaaaagttaacaaggatacccaggaattgaactcagccctgcaccaagcggacctaatagacatctacagaactctccaccccaaatcgaaagaatatacatttttttcagcaccacaccacacctattccaaaattgaccacatagttggaactaaagctatcctcagcaaatgtaaaagaacagaaattataacaaactgtctctccgaccacagtgcaatcaaactggaactcaggattaagaaactcactcaaaaccgctcaactacatggaaactgaacaacctactcctgaatgactactgggtacataacaaaatgaaggcagaaataaagatgttctttgaaaccaatgagaacaaagacacaacataccagaatctccgggacacattcaaagcagtgtgtagaaggaaatttatagcactaaatgcccacaagagaaagcaggaaagatccaaaattgacaccctaacatcacaattaaaagcaccagaaaagcaagagcaaacacattcaaaagctagcagaatgcaagaaataactaaaatcagagcagaactgaaggaaatagagacacaaaaaacccttcaaaaaattagtgaatccaggagcttgttttttgaaaagatcaacaaaattgatagaccactagctagactaataaagaagaaaagaaagaagaatcaaatagacgcaataacaaatgataaagtgagtatcaccattgatcccacaaaaatacgaactaccatcagagaatactacatacacctctacacaaaaaaactacaaaatctagaaggaatggataaattcctagacacatacaccctcccaagactaaaccaggaagaagttgactctctgaatagaccaataagaggctctgaaattgtggcaataatcaatagcttaccaacaaaaagagtccaggaccagaaggatttacagccaaattctaccagatgtacaagggggaactggtaccattccttctgaaattattccaatcaatggaaaaagagggaatcctcccaaactcattttatgaggacagcatcatcctgataccaaagccgggcagagacacaacaaaaaaacaaaattttagaccaatatccttgatgaacattgatgcaaaaatcctcaataaaatactggcaaaccgattccagaagcacatcaaaaagcttatccaatatgatcaagtgggcttcatccctaggatgcaaggctggttcaatatatgcaaatcaataaatgtaatccagcatataaacagaaccaaagacaaaaaccacatgattatctcaatagatgcagaaaaggcctttgacaaaattcaacatcccttcatgctaaaaactctcaataaattaggtattgatgggacgtatctcaaaataataagagctagctatgacaaacccacagccaatatcatactgaatggccaaaaactggaagcattccctttgaaaactggcacaagacagagacgccctctctcaccagtcctattcaacatagtgttgggaattctggccagggccattaggcaggagaaggaaataaagggtattcaattaggaaaagaggaagtcaaattgtgctcgtttgcagatgacatgattgtatatctagaaaaccccattgtctcagcccaaaatctccttaagctgatgagcaacttcagcaaagtctcaggatacaaaatcaatgtgcaaaaatcacaagcattcttatacaccaataacagacaaacagagccaaatcaagagtgaactcccgtttgcaattgcttcaaagagaataaaatgtgtaggaatccaacttacaagggatgtgaaggacctcttcaaggagaactacaaaccactgctcaatgaaataaaagaggatataaatatatggaagaacattccatgctcatgggtaggaagaatcaatattgtgaaaatggccatactgccgaaggtaatttatagattcaatgccatccccatcaagctaccaatgaccttcttcacagaattggaaaaaaactactttaaagttcatatggaaccaaaaaagagaccgcatcaacaagtcaatcttaagccacaagaacaaagctggaggcatcaggctacctgactttgaactatactacaaggctacagtaaccaagacagcatggtactggtaccaaaacagagatatagatcaatggaacagaacagagccctcagaaataacactgcatatctacaactatctgatctttgataaacctgaacaaaacaagcaatggggaaaggattccctatttaataagtggtgctgggaaaactggctagccatatgtagaaagctgaaactggatcccttccttacaccttatacaaaaattaattcaagatggtttaaaaagttaaacgttagacctagaaccataaaaatcctagaagaaaacccaggcattaccattcaggacataggcgtgggcaaggacttcatgtctaaaacaccaaaagcaatggcaacaaaagctataattgtcaaatgggatctaattaaactaaagagcttctgcacagcaaaagaaactaccagcagagtgaacaggcaatgtacaaaatgggagatagttttcacaacctacttatctgacaaagggctaatatccagaatctacaatgaactcaaacaaatttacaagaaaaaaaacaaacaatcccatcaaaaagtgggtgaaggacatgaacagacacttcccaaagaagacatttatgcagccaaaaacacatgaaaaaatgcttatccttaactggccatcagagaaatgcaaatgaaaaccacaatgagataccacctcacaccatttagaatggcaatcattaaaaagtcaggaaacaacaggtgttggagaggatgtggagaaatagaaacacttttacacttttggtggggctgtaaactaattcagccattgtggaagtcagtgtggcgattcctcagggatgtagatctagaaatacaatttgacccagacatcccattactgggtatatacccaaggactataaatcatgctgctataaagacacatgcacacgtatgtttattgcagcactattcacaatagcaaagacttggaaccaacccaaatgtccaacaataacagagtggattaagaaaatgtggcacatatacaccatggaatactatggagccatacaaaaatgatgagttcatgtcttttgtagggacatggatgaaattggaaatcatcattctcagtaaactatcgctaggacaaaaaaccaaacactgcatgctctcactcataggtgggaattgagcgatgagaacacatggacacaggaaggggaacatcacacactggggactgatgtggggtgggggtaggggggagggagagcattaggagatatacctaatgctaaatgacgagttaatggatgcagcacaccaacatggcacatgtacacctatgtaactaacctgcacaatgtgcacatgtaccctaaaacttaaagtataataataataaaatcaattaaatttaaaaaaaaactacacagcagtactctgagaaacttctttgtgatgaatgcaggcaactctcagagttgaacatatcttttgattgaacagttttgaaaatatatttttgtagaatctggaagtggatatatggagccctttgcggcctatagtgcaaaaggaaacatcttcacataaaacctacacagaagcgttctgagaaatttcttggtgatgtgtgcattcatctcacagagttgaatatttcttttgattgtgcagcttgaaatactgtttttgtggaatccgcaagtggatacttggagtgttatgtggcctattgtggaaaacgaaataccgtcacataaaaacttcacagaagcattctgagaaacttctttgttatatgtgtattcacctcacagagttgaacctgtctttttaaagagcaattttgaaactgtctttttgtagaatctgcaagtggatatatggaaccctttgtgacctatggtgtaaaaggaaatatcttcacaaaaaaactacacagaagcattctgagaaacttctctgtgaagggttcattcatctcacagacttgaacctttcttttgattgagcagtttggaaacttttttttgtagaatcagtaagtggatatttggaacgcttaggggactattgtggaaaaggaaatatcttcacataaaaactacacagaagcattctgagaagcttctttgtgatgtgtgcattcatctgacagagttgaaactttctttaagcagtttggaaacactctttttgtaggatctgcaagtggatatttggagccctttgaggcttatggtggaaaaggaaatatcttcagataaacactacacaggagcattctgaaaaactgctttgtgatgtgtgcattcatctcacagagttgaatttttcttttgattgagcagttttgaaacgctcttttcgtggaatgtgaaagtggatatttggagggttttgaggcctacggtggaaaaggaaatgtcttcacataaaaactacaaagaaggattctgagaaacttatttgtgatgtgtgcaatcaactcacagacttgaacatatctttggattgagcagctttgaaactgtctttttgtgcaatctgcaagtggatattttgagccctttgtggcctatggtgaaaaaggaaatatcttcagataaaacctacaaagaagcattctgagaaacttctttgtgatgtgtacattcatctcacagaataggaactttcttttgattgagcagttatgaaataccctttttgtagaatgatcatgtggatattttgagggctttgaggcctactgtggagaagttaatatcttcacatcaaaactactcagaatcattctgagaaacttctttgcgatgtgcgaattcatctgactgacttcaacctttcttttgtttgggcagtttagaaacactctttttatagaatctgcaagtgaatatttggagggaattgaggcctatggctgaaaaggaaatatctttacataaaaactacacaaaagcattctgagaaacttctttgtgatgtgtgcattcaaatcacagagctaaacctatcttttgattgaccagttttgaaactctcttttgtagaatctgcaagtggatatttggagtgctttgaggcctattgtggaaaagaaaatatcctcacataaaaactacacagaagcattctgagaaacttctttgtcatgtgtgcattcatctcaaggagttgaacgtttcttttgattgtgcagcttggaaacactgtttttgtagaatccgcaagtggatatttggagtgctatgtggcctatgatggaaaaggaaatatcttcacgtaaaaacttcacagaagcattctgagaaacttctttgttatgtttgtattcaagtcacatagttgaacctatcttttgatacagcagttttgaaactctctttttgtagaatctgcaagtggatattgggaaccctttgcagcctatggtgtaaaaggaaatatcctcacataaaaactacacagaagcatcctgagaaacttctttgtgatgtgtgcattcatctcacagagttgaacttttcttttgattgtgcagtttggaaacactccttttgtagaatctgtacgtggatatttggagggttttgagtcctacggtggtaaagaaaatgtcgtcacatgaaaaatacacagaggcattctgagaaacttctttgtgacgtgtggattcatctcccagagttgaacctatcgtttgattaagaagttttgaaactctctttttgtagaacctgcaagtggatatttggagccatttgcagcctctggtgtaaaaggaaatatcttcactttaaaactacacagaaacattctgagaaacttctttgtgacgtgtgcattcatctcacagatttgaaattttctgttgattcagcagttttgagacactttttttttgtagaatctgcagttggatatttggagcgctttaaggcctattgtggaaaaggaaatatctccacataaaaactatacagaaacattctgagaaacttctatgcgatgtgtgcattcatctgacagagttgaacctttctttagtttgagcagtttggaaacactctttttgtagaatctgcaatttaatacttggagcactttgaagactacggtggaaaaggaaataccttcacataaaaactacacaaaactattgtgacaagcttctttgtggtgtgtgcattcaactcacagggttgaacctatctttcgattgaccagttttgagactctctttttgtagaatctgcaagtgaatattaggaaatccttgtagcctatggtggaaaaggaaatatcttcacataaaaactacacagaagcattctgagaaacttctttgtaatgtgagcattcatctcacagatttgcacctttatttgattgagcagttttgaatctcactttttttattttctgcaagtggacatattgatccgtttgcagcctatggtggaaaaggaaatatcttcaaataaaaactacacagaaactttctgagaaacttctttgtgatgtgtgcattcatcacaaagagttggacctatcttattattgagcagttttgaaacactctttttgcagtatctgcaagtggatatttggagcactttgaggcccagtttgggaaaggaaatatcttcacataaaaactacacagcagcattctgggaaacttccttgtgatgtgtgcattcatctcccagagttgagcctgttttttgattgagcagatctgaaacactctttttgtagaatcagcaagtggatatttggtggtctttgaggcctattttggaaaaggaaatatcttcacaaaaaaactacacagaagcattctgagaaacttctttgtgatgtgtgtattcaactcacagtcttcaacctatcttttgattgagcagttttggttctctctttttctagaatctggaagtggatatttggagcctcttgcggtctatggaggcaaaggaaatatcttcaaataaaaactacagagaagaattctcagaaatttctaggttctatttgcattcatctcacagagttgaacctttcttttgatggaggagttttgaaacactccttttgtagattctgcaagtggatatttggtgcgcactgaagtctattgtcgaaaaggcaatatcttcacataaaaactacacagaagcattctgagaaacttctttttgatgtgtgcattcatctcacatagttgaacctttcttttcattgagaagttttgaaacacagtttttgtaggatctgcaagtggatatttggagagatttgaggtctactttgtaaaagcaattatcttcacataaaaactacacagaagcattctgtgaaaattttgtgatgtgtgcattcatctcacacagttgaaacattattttgattgagcagttttgaaacactctttctatagaatctgcaattggatattgtgagcattttgaggcctatagtggaaaaggaaatatcttcacataaaaactacacagaatcattctgagaaactgctttgtgatgtgtgcattcatctctcagagttgaatctatgttatggtttagcagttttcaaacactctctttgtagaatctacaagtggatccttggaaagatttgaggcatattgtggaaaaggaaatatgttcacataaaaactacacaaaagcattctgagaaagttctttgtgatgtgtgcattcaactcacagagtctaatctgtcttttgattgagcagtttttaaatactgtttttgtagaatctgcaagtggatattttgtggactttgaggcctattttggaaaaggaaatatcttcacataaaaactacacagaagcattctgagaaacttctttgtgatgtgttcattcaactcacaaacttgaacctatatttcgattaagcagttatggatttctctttttctaggatttggaagtggatattttgagtcctttgtggttcatggaggcaaaggaaatatcttcaaataaaatctacacagaagcattctgagaaacttctttgtgatgtgtgcattcatctcactgagatgaacctatcttatgtctgagcagctttgaaacactctctttgcagaatcttcaggggaatatttggagtgctttgtggccagttgggtaaaaggaaatagcttcacataaaacctacacagaattattctgagcaactactttgtgatgtgcgtattcatctaacagagctgtatgtttcttttggttgagcagttttgaaacactgtttttatagaatctgcaagtggatatttggaatgctttgaggcctactgtggaaaaacaaatatcttcatgtaaaaaccacacagaagcattctgagaaacatctctgtgatgtgtgcattcatcccacagagttgaaagtttcttttgattgagaacttttgaaacacactttttgtagaatctgcaagtggatatttgaagccctttgcagcctatggaggaaaaggaaatatcatgaaataaatactacacagaagcattctgagaaacttctttgtgatgtgtgcattcatctcatagattggaacctatcttatgattgagcagttttgaaacactctctttgtagaatctgcaagtggaaacttggacgattttaaccctatagtggaaaaggaaatatcttcacataaaaacttcacagaagcattctgagaaacttctttgtgatgtgtgcattcgtctcacagagatgaatatttcttttgattgtgcagttttgaaacactgtttttgtagaatctgcaactggatatttggagccctttgcggtctatatgaaaaaaggaaatatcttcagatagaaactacacagaaacattgtgagaaacttctttgtgatgtgtgcattcatctcacagagttgaacttttcttttgatggagaagttttgaaacactctttttgtagaaactgcaagttgctatttggagccctttgcggcatatggtgaaacagggaataccttcacataaaaactacacagaaacattctgagaaacttctttgtgatgtgtgcattactctcacagagttgaaccattcttttgattgagcaggtttgaaacaatctctttgtagaatctgcaagtggatacttggaatgctttgaggcctattgtggaaaaggaaatatcttcacatagaaactacacagtagaattcagtgaaacttctttgtgatgtgtgcattcaactcacagagttgaacatttcttttgattgaccagtttggaaacattctttttgtagaaactgcaagtggatatgtggagccttttgtggcctaaggtggaaaaggaaatatcttcacataaaaactacacagaagcattctaacaaactcccttgtgatgtgtgcattcatctgacagagttgaacctttattttgattgagcagttttgaaaaactcttttgtagaatctgcaagtggatctttggagagctttgagcctattgcaaaaaagaaaatatcttcacataaaaactacacagaaggagtctgagataatttttgtgattgtgcattcatttcacctttcttttgactatgcagtttggaaatactcttttagggtgatctgcaagtggatatttgcagtgctaggaggcatattgaggaaaaggaaatatcttcccataaaaaatacacagaagcattctgagaaacttatttgtgatgtgtgcattcaactctcggagttgaacctatcttttgataagcagtattgaaacactttttttttggaatctgcaggtggatatttggagcgctttgaggcctatggtgtaaaaggaaatatcttcacataaaaactacacagaagcattcaaagaaacttctttgtgatgtgagcattcaactcacagagttgaacttaactttttattgaggagctttgaaaatctctttttgtagaatctgcaagtggatatttagagccccttgctgcctgtggtggaaaaagaaatatcttcacataaaaacttcacagaagcattctgaaaaaaacttcttggtgatgtgtgcattcatatcacagagttcaacatttcttttgattgagctgttttgaaacactatttttgtagaatctgcaagtggatatttggagcactttgaggcctattgtagaaaaggaaatatcttcacatgaaaacaacacagaaacattctgacaaatttctttgtgatgtgtgcgttcatctcacagagttgaacttttcttttgattgagcagttttcaaacactgtttttgtagtatctctaagtggatattttgagcgcattggggtctatggtggaaaaggatatatcttcacataaaatctacacagaagcattctgagaaacttctttctgatgtgtgtattcaaaccacagatttgaacctatcttttgattgcacagttttcaaactctctttttgtagaatctgcaagtggatatttggaaccttttttggcctctggtggaaaaggaaataacttcacataaaaactacacagaagcattctgagaaacttcattgtcatgtgtggattcatctcagagtgttgaacctttcttttcactgagcacttttgaaacagtctttttgtagaatctgcaagtggatatttggagccccttgagtcctactgtggaaaagaaaatatctttacataaaaacatcacagatgcattctgagaaactactttgcaaggtgcgcattcatctcacatagttcaactttcttttgattgagcaattttgaaacacactttttgtagaatctgcaactagatatttggagtgcattgaggcctatggtggaaaaggaaatatcttcacttaaagctacacagaagcattctgaaaaacttctttgtgaaatgttcgttcaacacactgtggtgaacatttcttttcattgagcagttttgaaaaccactatttgtagaatctgcaagtggatatttgtagtgcttagaggcctattgtggaaaaggaaatatcttcacataaaaattacacagaagcattctgagaaacttgtttgtgatgagtgcattcagctcacagagttgaacctatcttttgatagagcaattttgaaactctctttttgtagaatctgcaagtggatatttggagccctttgtggcctatggtggagaaggaaatatcttcacataaaaactacacagaagcattctgagaaatgtctttttaagtgttcattcatgtcacagagcgctttgaggcccattgtggaaaaggatatatcttcacataaaaactacacagaagcattctgagaaacttctgtgtaatatgtgcattcatctcccagagttgtaactttcttttgattgagcagtttggaaacactcttttagtaaaatctacaagtggatacttggagcgctttgaggcatattgtagaaatggaaatatcttcacataacaactaaacagaagcattctgagaaacttctttgagatgtgtgcatttaactcagagttgtatctatcttttgatagaggagttttgaaactctctttatgtagaatctgtaagggaatatttggagccctttgtggcctatggtgtaaaaggaaataccttcacataaaaactacacagaagcattctgagaaacttctttgtgttgtgtgcattcatctcaaagagatgaacctttaattcgattgaacagttttgaaacactctttttgtagaatctgcaagtggatatttggaacgctttggagagaatggtggaaatggatatatcttcatataaaaactacggaaaagcattctgagaaacgactttgtgatgtgtgtattcaaatcacagcgttgaaccattcttttgattgtgcagttttgaaactctttttgtggaatctgcaagtagctactcggaggtctttgtggagtattgtggaaaaggaaataactttgcataaaagctacacagacacattctgggaaacttctttgtgatgtgtgcattcaactcacagagttgaacctttcttttgattgagcagttttgaaacacactttttgttgaatctgcaagtggatatttggagaggtttgggacttatggtggaaaagtaaatatcttcacataaaaactgcacagaggtattctgagaaacttccctctgatgtgcacattcagctcactgaattggacctttcctttgattgagcagttttgaaacactcttttgtagaatctgcaattggatatttgaagcgctttccagcctcgagtggaaaaggaaatatcttcacataaaaactatacagaaatattctgcgaaacttctttgtgatgtgtgcattcttctcacagagttgaacttttcttttgattgagcagttttgaaacactctttttgtagaatctgcaagtggatatttggagcacttccagtcctacggtgttaaaggaaatatcttcacatcaaaactagacagaagcactctgagaaacttctttgtgatgtgtacattcaactcacaggtttgaacctttcttttgattaagcagttttgaaacacactttttgtagaatctgaaggtggatattgggagcactttggggcctatggtgtaaaagaaaatatcttcaaataaaaactggacagaatcactctgagaaacaactttgtgatgtgtgcattcatctcactgagttgaacgtttcttttgattgagtagttttgaaacgcacatttgtagactctaccaggggatatttggagtactttggggtctatggtggaaaaggaaatatcttcacctaaaaactagacggaagcattgtgagaagcttctttgtgatgtgtgcattcaactaacacagttgaacctttcttttgattgagcagttttgaaacactctttttgaagaatctgcaagtggatatttggagcgctttgcagcctattgtggaaaaggatatatcttcaaataaaaactagacagaagcactttgagaaacttctttatgagatgtgcattcatctcgcagacttgatcctttctttcgattgagcagttttgaaacactatttttgtagaatctgcaagggatatttgaagagatttgaggcctaatgtggaaaaggaaatatcttcacatgaaaactagacagaagcattctgagaatcttctttgtgatgtgtgcattcatcttacagagctgaaactttcttttgattcagcagttttgaaatactctgtttatggaatctgcttgtggatttttggagcaatttgagtcacgttgtggaaaaggaaatattgtcatatgaaaactagaaagaagcattctgagaaaattatttgtgatgtgtgcattcaactcacagagttgaaagtttcttttgattgagcagtttggaaacactgtttttgcagaatctgcaagttgatatttgtagcgcttggtggcctatattggaaaaggaaatatcttcacatatatacaagacggaagcattcagggaaactactttgtgatgtgcattcaattcaaagagctgaacatttaccctgattgagctgcttggaaagcatctttctgtagtatctgcaattggacattttgagcgctttgaggcctatggtggaaaaggaaatatcttcacataaaaactagacagaagcattctgagaaaattctttgtgatgtgtgcattcaactcacagagttgaacctttcttttgatcgagcagtttggaagcagtctttttgtaatatctaccagtggatatttggatcactttacatcatggattggaaaaggaaacatcttcacataaaaactagacaaaagcatactgagaaacttctttgtgatgtgtccattcatctcgtagagttaaatctttcttttgatagagcaggtttgaaacactctttttgtaggttctgcaagtgtatatttggagtgctctgtggccgatagtggaaaaggaaatatcttcacataaaaaaatacacagaagcactctgagaaacttctcggtgttgtgtgcagtcatatcacagacttgaaactttctttgatacagcagtttcaaaacgctttttggagattctgaaagtagatatttggagagacttggggcctatggtggaaaaggaaatatcttcacataaaaactagacagaagcattctgagaagcttctttgtgatatgtgcatccatctcaaagagttgaacctttcttttgattgagcatttttgaagcactctttttgtagaatcttcaagtggatatttggaatgctttgtggcctgtggtggaaaaagaaatatcttcacataaaaactagacagaagcattctgagaaacttatttgtgatgtgctcattcaactcacagatttaaacttttcttttgattgagcagtttggaaacagtctttttgtagtacctgcaaatggatatttggagtgctttggggcctgtggtggaaaaggaaatatatacacacgaaaactagacagaaacattatgagaaactgctctgtgatgcgtgcattcatcaccagggttgaacctttcttttgattgaacagttttgaaacactctttctgtagaatctgaaggggatatttggaacgccttgcagcctatggtgaaaaacgaaatatcttcacataaaaactagacagaagcattctgagaaagtgctttgtgaggtgtacattcatctcacagagttaaacctttcttttgattgagcagttttgaaacactcttattgtacaatcttcaagtggatatttggagagtttgaggccactggtggaaaagcaaatatcttcacataaaaactagacagaaccattctgagaaatctctttgagatgcgtgcattcaactcacagagttggacctttcctttgattgagcagtttggaaacagtctttttgcagtatatgcaaatggatatttggagcactttcaggcctatagtaggaaaggaaatatcttcacataaaaactagacagaaaattactgagaaatttctcagtgatgtgtgcattcatctcacagagttgaaactttcttttgattgagcagtttggaaacactcttttagtagaaactgcaaggggatatttggagcactttgtggtctttggtagaaaaggatatatcttcacattaaaaatagacagaagcattctgaggaacttcttcatgatgtgtgcattcatctcagagagttgaacttttcttttgattgagcagctttgaaaaactctttctgcagaatctgcaagttgatatttggagtgctttggggcctatagtagaaaaggaaatatcttcacataaaactagacagaagcattctgagaaacctctttgtgatgtgtgcattaatgtcacagagttgaacctttcttttgtttgagcagttttgaaactctctttttgtagaatcttcaagtgaatatttttagcactttgaggcctgtggtggaaaagaaaacatcttcacataaaaactagtcagaagctttctgagaaacttctttgtgatgtgtgcattcaactcatggagttgaacctttcctttgattcagcagtttggaaacagtctttttgtagtatctgcaaatggatatttggagagctttgaggcctatggtggaaaagaaaatatcttcacataaaaactagacagaagcattctcagaaacttctttgtgatgtgtgcattcatctcacagagctcacagagttgaacccttttttttttattgtactttaagttttagggtacatgtgcacattgtgcaggtaagttacatatgtatacatgtgccatgctggtgcactgcacccactaacgtgtcatctagcattaggtatatctcccaatgctatccctcccccctcccccgaccccaccacagtccccagagtgtgatattccccttcctgtgtccatgtgatctcattgttcaattcccacctatgagtgagaatatgcggtgtttggttttttgttcttgcgatagtttactgagaatgatggtttccaatttcatccatgtccctacaaaggacatgaactcatcattttttatggctgcatagtattccatggtgtatatgtgccacattttcttaatccagtctatcattgttggacatttgggttgtgaacccttgttttgattgagcagtgttgaaacactttttatagaatcagcaagtggatatttgttgcactttgagacctatggtggaaaaggaaatatcttcacagaaaaaccacaaagaagaattctgagaaacacctttgtggtgtgtggtttcatctctcatatttgaacctttctctttattgagcagtttggaaacaatctttttgtagtatctgcaaatgaatttttggagctctttgaggcctgtggtgaaaaatgaagtatcctcacataaaaaccagacagaaggattcctagaaactgctttgtgatgtgtgcattaatctcacagatttgaaactttattttgattgagcaattttgaaacactctttatgtagaatctgcaagtggatatttggagcgctttgaggcctatggtggaataggaaatatcttcacattaaaacaggacggaagcattctgagaaacttctttgtgttgtgtgcattcatttcacagagttgaaccattcctttgattgagcagtttgccaactgtcattttgtagaatctacagagggatatttgtgaacccattaatgcctatggggtgataggaaagatcttcatataaaaactagagagaaactttctgagaaacttctttgtgatgtgtgcattcatctcacagagttgaacttttcttttgattgagcagtttggaaacagtcttttttggaatctgcaaacagatacttttttttgctttgaggcctatggcggaaaaggaaatatcttcacataaaaactagacagaagcattctgagaaacttctttgtgatgtgtgcactcatctcacagacttgaagctttcttttgattgagcagttttgaaaaactctttttgtagaatctgcaagtcgatatttggagcgttttgtgtcctatattggaaaaggtaatatcttcacatagaaacttgacagaagcattctgagaaacttctttgtgatatgtgcattcatctcacaggatttaactttcttttgattgagcagtttggagcccatcgttttgtaggatctgtgaaggggtatttttgttcccattgaggcttatggggtaataggaaatatcttcacataaaaactaaacagaaaaattctgagaaaattctttgtgatatgtgctttcatctcacagagttgaaattttgttttgattgggcagtttggaatccgtctttttgtagaatctgcaagtggatatttggagggctttgagacctatggtgaaaaaggaaatatcttcacattaaaaatatacagaagcattctgagaaacttctttgtcttgtgtgcattaatttcgcagagttgaacctttgtattgattgagcagtttggaaacggtagttttgtagaatctgtagagggatatttttcagcctactgaggcctctgaggaaatagagaatatcttcagataagaaccagacagaagcattctgagaaacttccttctggtgtgtgcattcatttcacagagttgaacctttcttttgattgagcagtttggaaacagtgtttctgtagtaactgcaaatggatatttggagtgctttgaggcatacgtttaaaaaggaaaaaaaacaaaccaacaaccccttcaaaaagtgggcgaaggacatgaacatacacttctcaaaagaatatgtttatgcagccaaaaaacacatgaaaaaatgcccaccatcactggccatcagagaaatgcagatcaaaaccacaaggagataccgtcacacaccaattagaatggcaatcattaaaaaatcaggaaacaacaggtgctggagaggatgtggagaaataggaacacttttactcagtgggtggcactgtaaactagtacaaccattgtagaagtccgtgtggtgattcctcagggatctagaactagaaatactatttgacccagccatcccattgctgggtatataaccaaaggactataaatcatgctgctataaagacacatgcacacatatgtttattgtggcactagtcacaacagcaaagagttggaaccaacccaaatgtccaacaatgatagacttgattaagaaaatatggcacatatacaccatggaatactatgcagccataaaaatgatgagttcatgtcctttgtagggacatggatgaaattggaaatcatcattctcagtaaactatcgcaagaacaaaagaccaaacactgcgtattctcactcataagtgggaattgaacaatgagaacacatggacacaggaaggggaacgtcatactctggggactgttgtggggtggggtgagggggcagggatagcattaggagatatacctaatgctaaatgacgagttaatcggtgcagcacaccagcgtggtacatgtatacatatgtaactaacatgcacattgtgcacatgtaccctaaaacttaaagtataataataataaaataataaataaataaataaataaaaaggaaatatattcacataaaaacttgacagaagcactctgaggaacttctttgtcatgtgtgcattcatttcacagagttgaaactttcttttgattgagcagttttgaaacactcttttttcagaatctgcaactggatatttggagaacgttgaggcctatggtggaaaaggaaatatcttcacaaaaaatcagacacaaccattcagagaaacttctttgtgatgtgtgcattcaactccctgtgttgaagttttcttttgattgagtagttttaacaaactctttttgtagtatcagaaactggatatttgtagcgttttgaggcctatagaggaaaaggaaatatcttcacataaaacccagaaagaagcattctgagagaattctcttcgatttcagcattcatctcacagagttgaacttttcttttttgaaaagtatttaatcactctttttgtagaatctgcaaggggatatatggagcactttgaggccttttgtggaaaaggtaatatcttcacataaaaatcagacacaagcattctgagtaacttctttgtgatgtgtgcattcaactccctgtgttgaaactttcttttgattgagcagttttaacgcactctttttgtagaatctgcaagtggatatttggagcactttgatgcctatgatggaaaaggaaatatcttcacataaaagctagacagaagcattctgagaatgttctttgtgatgtatgcattcatctcactgagctgaatctttcttttttgagaagtatttaaacactctttttgtagaatctgcaagtggatacttggagtgctttgaggcctttggtggaaaaagaaatatcttcacataaaaactagacagaagcattctgagaaacctctttgtgatgtgtacattcatctcacagagttgagcctttattttgatttagcagtttggaaacactctttttgtaggatctgcaagtggatatttggagtgatttgaggcctatagtggaaaaggaaataacttcatgtgaaaagtagacagaagcattctgaaaaacttcttagcgatgtgtgcattcatctcacaaaggtaaacctatcttatgattgagcagttttgaaacactctttttgtggaatcttcaattggatatttggagtgcttagatgcctgtgttggaaaaggaaatatcttcacgtaaaaacaagcaaggagaattctgagaaagttttctttgtgatttgtgcattcatctcacagagctgaaattttcttttgattgagcagtttggacacagtctttttctcgcctgcaaaaggatatttagggcactttgaggcctatggtgaaaaaggaaatatcttcccctaaaaactaggcagaagcattctgagaaacttctttgtgatgtgtgtattcatgtcacagagatgaaactttcttttggttgagaagttttgaaaaactctttcgtagactgtgcaagtggatatttggagcgctttgaggcctatggtggaaaaggaaatatcttctcataaaaactagacagaagcattctgagaaatttctttgtgatgtgtgcattcatctcacgaagttgaaccattcttttgattgagcagttttgaaacacactttttgtagtatcttcaagtggatatttgtaactctttgaggcctatggtagaaaaggaaacattgtcacataaaaactagtcagaagcattctgagaaacttctgcctgatgggtgtattcacttcacggagttgaacctttccttgtattgaacagtttggaaacaatcgtttcgtagaatctgcagagggatatttttgagcccattgagacgtatggggtgataggaaatatcttcacataaaaactagacagaaactttctgagaaacttctttctgatgtgtgctttcatctcacagatttgaacttttattttgattgagcagttttgaaacagtctttttgtacaatctgcaagtggatatttggggcactttcaggcctatggtggaaagggacacatcttcccataaaaactagacagcagcattctgagaaacttatttgtgatctgcgcattcatctcacagagttgaacctttcttttgattcagcagttgtgaaactgtagttttgtagaatctgcaaagggatatttgtgagcccattgaggcttctggggagataggaaatatcttcacataaaaactagacagatactttctgagaaactattttgtcatgtgtgacttcatctcaccaggttgaaactttctcttgattgagctgtttgggaccagtctttttgtagaatctgcaaatggatatttggagcacttttggcctatgttgaaaaatgaaatatcttcccatagaaactaggcagaagcttttggagaaatttctttgtgatgtgtgccttcatctcacacagttgaactggttcttttgattgagcagtgtggaaacactctttttgtagagtctgcaagtggatattttaagcactttgtggcctatagtgaaaaaggaaatatgctcacgtaaaaactagacagaagaattctgagaaacttcctttgaatgtgcgcatttatctcacagtgttgaacctttttttgattgagcagcttctaaacagtcattttgtagaatatgcaaaggaatatttttgagcccattgatgcctctggggaaataggaaatatcttcaaataaaaactagacagaatctttctcagaaacttctttgtgatgtgtgcattcatctcactgagttgaactttattttgaatgagcagtttggaaacagtctttttgtagtatctgcaaatggatattttaagctctctgaggcctacggtgaaaaaggaaatatcttcaatataaatcagacagaattattcatagaaacttctttttgatatgtgcattcatctcacagattagaacttttcttttgattgagcagttttgaaacactcttttagcagaatctgcaatgtatgtttgaagcacatgaggaatatggtggaaaaggaatcttcttcacataaaaacgagacagaaacattctgagaaacttttctgtgatgggcgcattcatttcacaaagttaaaccgttcctgtgattgaatggtttggaaacatttgttttgtataatctgcagaaggatatttttgagctgattgaggcctatggggcgataggaaatatgttcacataaaaactagacagaaaatttctgagacacttctttgtgatatttgctttcatctcacagagttaaaactttcttttgattgagcagtttgggaaaagtctttttgtagtatctggaaatggatattaccagtgctttgacacctatggtgaaaaaggaaatatcttcccataaatacaaggcagaaggattctgagaaacttctttgtgatgtctgcattcatctcacaaagttgaacctttcttttgattgagcagttttgaaacactctctttgtagtatctgcaagtggatatttggaacactttgaggcctatagtggaaaaggaaatatcttcacataaaaaactagaaagaagagttctgagaaacttcctaggaatgtgtgctttcttctcacactgttgaacctttcttttgattgagcagcttcgatacagtcatttagtagaatctgaaagagaatatttgcgagcccattgaggcctcttggaaagtaggaaatatcttcacctaaaaactagacaaaaactttctgagcaacttccttgtgatgtgtgcatttatcacacgcagttgaactttcttttgattgagcagtttggaaacagtcatttgtattatctataaatggatatttggagtgtaatgaggcctatggtgaaaaaggaaatatcttcacataaaaatcagatggaagcattcttagaaacttctttgtgatgtgtacattcatctcacagacttcaatctttcttttgattgagcagttttgaaacactctttttgcaggatctgcaagtgtatatttgaagcgctttgaggcctctggtggaaaaggaaacatcttcacataaaaattagacacaagcattctgagaaacttctttctcatgggttcattcatttcacaaagttgaacctttcctttgattgaacagtttgaaaaccgtcgttttgtagaatctgcagagggatatttgtgagcccattgagacctatggggcgatacgaaatatcttcccataaaaactagacagacactttctgagaaacttctttgggatgtgtgctttcatctcacagagttgaaactttcttttaattgagcagtttggaaacagtctttttgtagtatctgcaattggatattagcagctctttgaggcctaaggtgaaaaaggaaatatcttcccataaaaactaggcagaagcattctgagaaacttctttgtgatgtgtgcattcatctcacagagttgaacctttctttttattgagcagtttggaaacaggctttttgtagtatctgcaaatggtaattagagcgctttgaggcatatgttggaaaaggaaatatcttcacattaaagctagactgaagcattctgcgaaacttctttgtgatgtgtgcattcatttcacagagttgaacttttcttttgattgaacagttttgaaacactctttttgtacaatctgcaagtggatatttggagcgctttgaggtcattggtggaaaaggacatatcttccaatgaaaactagacagaagtattctgaaaaactttttgtgatgtgtgcattcatctcacagagttgaacctttcttttcattgagcagtttggaaacagtatttttgtagaatctgcaagtggatatttggagcactttgaggcctatggtggaaaaggacatgtcttcccataaaaactagacagcagcattttgagaaacttctttgtgatgtgtggattcatctcacagagttgaacttttcttttgattgagcagttttgaaacactctttttgtacaatctgcaagtggatatttggagcgctttgaggtcattggtggaaaaggacatatcttccaataaaaactagacagaagtattctgagaaacattttgtgatgtgtgcattcatctcacagagttgaacctttctttttattgagcagtttggaaactgtatttttgtagaatctgcaagtggatatttggagcactttgaggcccatggtggaaaaggacatatcttcccataaaaactagacagcagcattttgagaaacttctttgtgatgtgtggattcatctcacagagttgaagctttcttttgattgagtagtattgaaacactcttgtggaatctccaattagatacttggagcgctttgaggcctatggtggaaaaggaaatatcttcacatgaaaactacacagaagcattctgagaaatttgtttgtgatgtgtgcattcaacacacagagttgaatctttcttttgattgagcagttttgaaacacacttttttaggatctacaagtggatatttggagcgctttgtggcctattgtggaaaaggatatatcttcacataaaaagtatggagaagcattctgagaaacttctttgtgatgtgtgcattcatctcacagagttcaacctttcttttgattgagcagttttgaaacgctctttttgtagagtgtgcaagcagatatttggagctctttgaggcttatggtggaaaaggaaatatcttcacataaaaactacagagaagcattctgacaaagttctttgtgctgtgtgtgttcaactcacagagttgaacctttctttcgattgagcagttttgaaatgccctttttttagaatctgcaagtggatattttgagtgctttgtggcctctgttggaaaaggaaatatcttcacataaagtagacagaagcattctgagaaacttccttgtgatgtgtgcattcatctcacagagagtaaactttcttttgattgtgaagttttcaaacactctttttgtaggatctgcaagtggatattttgaggtctttgtggcctataggggaaaaggaaatatcttcacataaaaactacagagaagcattctgacaaagttctttgtgctgtgtgtgttcaacttacagagttgaacctttcttttgattgagcagttttgaaatgccctttttttggaatctgcaagtggatattttgagtgctttgtggtctctgttggaaaaggaaatatcttcacataaagtagacagaagcattctgagaaacttccttgtgatgtgtgcattcatctcacagagttgaaactttcttttgattgtgaagttttcaaacactctttttgtaggatctgcaagtggatatttggaggcctttgtggcctataggggaaaaggaaatatcttcatataaaaattagacagaagcattctgagaaacatctttgtgatatatgcattcatctcacagcgttgaaattttctttttattgaccacttttgaaacactctttttctactgtcggcaagtggatatttgtagtgctttgaggcatatggtggaaaatgaaatattttcacaataaaattagacagaagcattctgtgatacttctttgtgatctgtgccttcatatcacagagttgaacctttctattgattgagcagttttgaaacactctttttgtaaaatctgccaatggatatttggagcactttgaggcctatagtggaaaaggaaatatcttcacataaatagtagacaagcattctgagaaacttctttgtgatgtgtgcattcaactcacagaatggaacccttattttgatagagcagttttgaaagactccttttgtataacctgcaattggatatttcgagcgctatgtggtcttaagtggaaaaggcaatatcttcgcataaaaactagacagaagcattctgagaaatttctttgtgatgtgtgcattcatctcacagagttaaagctttcttttgattgagcagttttgaaacactctttttgtagaatctgcaagtggatatttggagcactttgcagtctatagtggaaaaggaaatatcttcacataaatatttgtcagaagcattctgagaaacttcttcttcatgtgtgcattcatctcacagagttcaacctttcttttgattgagcagttttgaaacactctttttgtagtatctgcaagggatacttggagcagtttgaggtctatggagtaaaaggaaatatcttcacctaaaaactagacagaagcattctgagaaacttctttgtggtgtgtgcattcatatcactgtcttgatccattcttttgactgagcagttttgaaacactctttgtgtagaatctgcaagtggatatttggagtgctttgaggcctattgtggaaaaggaaatgtcttcacataaaaaccagacagaagcatactgagaaaattatttatgatgtgtgcattcatctcacagagctgcacctttcttttgattgagcagttttgaaacaccctttttatagagtgtgcaagctgatatttggagcactttgatgcttatggtggaaaagcaaatatcttcacataaaaactccagagaagcattctgacaaagttctttgtgctgtgtgcattcaactcacagagttgaacctttcttttgattgagcagttttgacacactctttttgcagaatctgcaagtggatattttgagcgctttgcggcctctgttggaaaaggtaatgtcttcacataaactagacagaagcattctgcgaaacttcttcgtgatgtgtgcattcatctcacagagttgaacctttcttttgattgagcagttttgaaacactctttttgcagaatctgcaagtggatatgtggagcactttgaggccatgatacaaaaggaaatatcttcacataagaactagacagaatcattctaagatacttctttgtgatgtgcacattcaactcacagagttgaacatttcttttgattgagcagttttgaaacactctttttgtagaatcagcagttggatatttagagcgctttgaggcctatggtggaaaaggaaatatcttcacataaaaactagacagaagcattctgagaaacttttttgtgatgtgtgcattcaactcaccgagttgaacagtctttttattgagcagttaggatacattcttttcgtaccatcttcaaatttgtatttggacagctttgaggcctatagtggaaaaggaaatatctgcacataaaaattagacagaagcattcggagaaacttctttgtgatgtgtgcactcatctcacagagttaaaccattcttttgattgagcagttttgaaacactctttttgtataatctgtaagtggatatttggatcactttgaggcatatggtggaaaagaatatatcttcccataaaaactagccagaagcattctgagaaacttctttgtgatgtgtgtattcagctcacagagttgaacctttattttgattgagcagttctgaaacacactttttgtaggatctgcaattggatatttggatcgctttgcggcctcttgtggaaaaggaaatatcttcacataaaaactacagggaatcattttgagaaacttctttgtgatgtgtgctttcagctcgcagagttgaacctttcttttggttgagcagttttgaaacactctttttgtagaatctgcaagtggatatttagagcgctttgacgcctatggtggaaaaggaaatatcttcacatgaaaagtagacagaagcattctgagaaacttctttgtgttgtgtgcattcatctcacagagttggactttctttttgttgagcagtttggaaacactctttttgtagagtctgccattggatatttagagcgctgtgaatcctatggtggaaaaggtcatatcttcacataagaactataaagcaggttttctaaaaacaacattgtgttgtgtgcattcatctcacagaggtaagtgtttcttttctcctatcagtctggaaagtctgttcttgtacaatctcaaagggggtatttttgagcactttgaggcctattgtaacaaaggaaatatcttcacattcaaagtataaagaaagtttctgagatacttctttgtgatatgtgcattcatctcacagatttgcgcgtctcttttaattcagccgtttggaaacagtctttttgaagaatctgcaaacggatatttgtgagcactttgaggcctatgcaggaaaagaagtatcttcacagaaaactataaagaaggtttctgagaaactgttttttgatgtctgcattcatcttgcagaggtaaacaattcttttctttgatcagttgggtatctctgttcttgtaggatctgctaagggatatttttgaatgcctagacccctatggtgaaaaagatattgtcttcacataaaaactagacagaggcctactgtgaaacttcttggtgatgtgtgcattcatctcacagaattgaaactttcttttgattaagcagtttggaaacgtctttttgtggaatccgtaaagggaaatttctgatcactttgaggcctatggtgaaagagaaagtatcttcacataaaaactagactaaagatttctgagaaactgctttgtgatgtatgtattcatctcacagagttcaacaattcttttgatcgagcagttgggaaaccgtctttttgtagaatctgcaaagggatatttgtgagcacttagaggtctatggttaaaaggaaatatcttcacataaaaactataaagaaggtttgtgagaaacttctttatgatgtgtgcattcatctcacagagttgaaccactcctttgactcagcggtttggaaacagtcttttttagcatctgcaaagggatatttttgagcactttgaggcccatggtgaaaaaggaaacactttcacataaaaacaagatagaagctttctgagaaccatctttttgatatgtgcattcatcccacagatgtgaacctttcttttgatgagcattttggaagcagtatttggtagaatttccaaagggttattagttagtgttttgtgtcctatgttggaaaaggaattatttttaaataaaaactagacagaatatttctgagaaactgccttgtgatgtgtgatttcatctcacagaggtaaccatttcttttcattgaacagattggaaattctgttcttgtaaaatctgcaaagggatatttgttagcactttgaggcctatggtaaaaaaggaattatcttcacataaaaactagacggaggctttctgtgaaacatcttggagatgcgagaatttgtctcacagagttgaaacattcttttggttgggcagtttgtaaacagtattttggtagaatctgcaaaggaatatttgtgatgctttgaagcctatggtgaaaacgaaatattttcacatgaaaactagagagaagctttctgagaaacctccttgtgatgtgtgcattcatctcacagatttgaaactttctttggattgagcaatttggaaacagtatttttgtagaatctgtaaaggcatatttttgagtggtatgaggcctatgatgaaataggaaatatcttcacataaaaactagatagaagctttccgagaaacttctttatgatgtgtgcattcatctcgtagagttcaaccattcttttgattgaacagtttggaaacactctttttgtagaatctgcaaagggatatttatgagtgctttgaggcctatggtgaaaaaggaaatgtattcacataaaaagtataaacaaggtttctcagaaacagctttgtgatgtatgcattcatctcacagaagtaaacgtttcttttctctgatctgtctggaaactgttcttgtagattctgcaaagggatatttgtgagtattttgaggcctatggtgaaaaaggaaatatcttcacataaaaattagagagaggttttctgagaaacctctttgtgatgtgggcattcatctcacaaagttgaaacttacttttgattgatcagtatggaaaccatcttttgtggaatctgcaaagggaaatttatgagagctttgaggccaatggtgaaaaaggaaatatatttatataaaaggcataaagaaggtttcttagaaacagctttgtggtgtgtgcattgatctcagagaggtaaacgtttattttctttgatcagtctggaaactctgttcttgtagtatctgcaaagggatatttgtgagtgctttgaggcctatgatgaaaaaggagatatcttcacataaaaactagacagaatctttcttagtggcttctttgtaatgtgtgcaatcatctcacagaattgaaccattcttttgattcagcagtctggaaacagtatttttgtagaatctgcaagggatatttgtcacgacttcgagtgctatggtgaaaaaggaaatatcttcacataaaaaatggacagaagatttctgagaaacctctttgagatgtgtgcatccatctcacagagttcaaccatttatttgattgagcagttgggaagcagtctttttgcagaatctacaaagggatattgctgagcaatttgaggcctgtgttgaaaaaggaaatatcttcacataaaaactataaagaaggtttctgagaaacttctttgtaatgtatgcattcatctcatggagttgaactattcttttgattgagcactttggaaacaatctttttgtagaatctgcaaaaggatatttttgagcgctttgagtcctagggagaaaaaagaaatatcatcacataaaaagtataaagaacgtttctgagaaaaagttttgtgatgtgtgcattcatctcacagagaaaaacgtttatgttgtttgatcagtctggaaattctgttcttgtagaatctgctaagggatatttttgagcagatggaggcctatggtgaaaaaggaaatgtcttcatataaaaattagacagaagcctcctgcgaaacttcttagtgatgtgtgcattcatctcacagagtagaaactttcttttcattgagccatttggaaacagtctttttgtagactctgcaaatggatatttggagcactttgaggcctatggtgaaaaaggaaatatattcacataaaaaccagactgaaagtttctgagaaacttctctgagatgtgtccattcatctcacaaagttcaataattctttttattgagcggtttggaacaatctttttgtggaatctgcaaagagatatttgtgagggctttgagacctatggtgaaaaaggaaatatcttcacggaaaaactataaagaaggtttctgagaaacttctttgtgatgtgtgcattcatctcacacagttcaacctttcttttgattgagcagtttggaaacagtctttttaaatattcctccagtggatacttgtgagcaccttgaggctcctggggaaaaaggaaacattcacttaaaaacttaatagaagctttctgagaaactactttttgacgtgtgcattcatctcacagagttgaacctttcttttgatgagcagtgtggaaacaatctttttgtagaatctgcaaaaggacatttttgagtgctttgcatcctgtggtggaaaaggagataccttcacataaaaactagacagaatgtttctcagaaactgctttgtgatatgtgcattcatctcccagatgtgtctgtttctttgcattgagaagattggaaactcttttcttgtaagatctgcaaagggatatttgtgagccctttgaggtgtatggtgaaaaaggaaatatcttcacataaaaactacacagaagctttctgagaaacatcctcgtgatgtgagcattcacctcacagagttgaaacattcttttgattgagccatgtgtaaagagtctttttgtagaatctgcaaagggatatttgtgaatgctttgaggcctatggtgaaaaaggaaatatcttcacataaaaactagagagaagctttctgagaaacctctttgtggtgtgcatacaactcacagagttgaacctttcttttgattgagcaatttggaagaagtatttttgtagaatctgtaaagggatatttgtgagcactttgaggcctatggtgaaaaactagacagaggcattctaagaaacttcttcatgatgtgtgcattcatcacacagagttgaacctttgttttgattgagccgtttggaaacagtctttttgtagactctgcaaacggatatttggagcactttgaggcctatcgtgaaaaaggaaatatattcacataaaaactagactgaaggattctgagaaacttctttgagctgtgtgcattcatctgacagtgttcaataattctttttattgagcagtttggaaacagtctttttgtagaatctgcaaagggatatttgtgagggctttgaggtctgtgttgaaaaaggaaatatcttcagggaaaaaccataaagaaagtttctgagaaacttctttggatgtgtgcattcatcacactgagttgaaacattctttggattgaacagtttgcaaacagtctttttgtagaatctgcagagggatatttgtagcgctttgaggcctatggtgaataaggaaatatattcacataaaaactagacaaaagttttctgagaaactttttttgatgtgtgcatttatctcatagagtttaacatttgttttgattgagcagtctggaaacagctttttgtacaatctgcaaagggatatttaggagtaagttgaggcctatggtggaaaaggaaatatctaacataaaaactagaaagaagcattctgagaagctcctttaagatatgtgtactcatctcacagaggtaaacatttcttttcattgagcagtttgtaaactctgttattctagagtctgcaaaggggtatttttgagagctttgagacccatgttgaaaaaggaactatcttcacataaaaactagtgagaagcttgctgagaaactactttctgatgtgtgcattcatctaacagagttgaaactttcttttgattgagcagtttggaaacagtctttttgtagattctgcaaaggtatatttgggagtgcattgaggcctatgttcaaaaaggaaacatcttcacataaaactgagaaggaggttttctgagaaacttctttgtgatgtgcacattcgtctcacagggttgaaccattctgtttattgagcagtttggaaacaatctttttgtagaatctgcaaagggatatctgtgagttcattgaggcttatggtgaaaaaggaaatatattcacattaaaagtagaaagaagttttctgagtaactcatttgtgacatgtgcatttatcacagagaagtaaaaatttcttcccattgagcagttagtttttgtgaagatatttccgttttcaccatagacctcaaacggcctacatatatccctttgcagattctacaaaaagactatttccaaactgctctatcaaagaaagcttccactctgtgagatgaatgcacacatcacagagaagtttctcaaaaagtttctgtctagttttatttgttgatactcccttttcaccataggcctcaaatcgctcatgaataactctttgcagattctacaagaagactgtttccaaactactcaatcaaaagaaagcttcaactctgtgaggtgaatgcacacatcacaaagaagtttctcagaaagcttctgtctagtttttatatgaagatgtttcctttttcaatataggcctcaaagtgctcacaaatgtccctttacagattttacaaaaagactgttaccaaactgctcaactgaaacaaagcttcaactctttgagatgaatgcacacatcacaaagaagtttctcagaaagcttccgtccagtttttatgtgaagatatttcctttttcaccataagtctcaaagcattcaaattatcactttgcagattctacaaaaagacattttccaacctgctctatctaaagaaaggtttaactctgtgagaagaatgcacacatcaaaaataagtttctcagaatgcttctgtctagtttttatctgaagacatttcctttttcaccatagaccaaaaagggatcccaaatatccctttgtacattctacaaaggactgtttccaaactgctcaatccaaagacaggttcaacttttgggatgaatgcacacatcacaacgaagtttctcagaaagcttctgtctagtttttgtgtgaagatattacttttttcaccataggcttcaaagggctcacaaatatcacaaagcagattctacaaaaagactctatccaaactggtcaaggaaaagaacacttcaaatctgtgagatgaatgtgcacatctcaaataattttctcagaaagcttctgtctagtttttatgtgaagatatttccgttttcaccatagacctgaaaccgcctatatataacccttttcagattctacaaaaagactgtttccaaacggctcaatcaaagaaagtttctactctgtgagatgaatgcacacatcacagggaagtttttcagaacgtttctgtctagtttttatttgtcgatactccctttttcaccataggccttaaactgctcataaataaccctttgcaggttctacaaaaggactatttccaaactgctcaatcaaatgaaatttcagctgtgtgagatgaatgcacacatcaaaaagaagtttctcagaacgtttctgtctagtttttatgtgaagatacttctttttcaccataaacctcaaagcgttcccaaattttcctttgcagattctatgaaaagactgtttccaaactgctcaatcaaaagaaaggttcaactttttgtgatgaatgcagacatcacaacgaactttctcagaaggcttctgtctagattttatttgtggatatttcctttttcacaataggcctcagaaagctcacaaatatcactttgcatattctacaaaaagactgtttccaatctgctcaatgaaagaaaattcaactctgtgagatgaatgcatgcatcacaaagtggtttctcagaatgtttctgtctagtttttatatgaagatatttcctttttcatcacatgcctcaaaccattcaaaaacatcccttttcagattctccaaaaagactttttacaaactgctcaatcaaaagaaagattcaagtctttgagatgcatacacccattacaaagaagtttcccagaaaacatgagtctagtttttatgtgaagatatttcctttttcaccataagcctcaaagcattcacaaatatcactttgcattttctatgaaaagactgtttccaaactggtcaatcaaaagaagtttcaaccctgtgagatgaatgcacacatcacaaagaagttcttcagaaagctactgtctacattttattttttgatatttcctttttcaccattggattcaaaccactgaaacatatcactttgcagattctacaaaaagactgtttccaaactgcccaatcaaaagaaaggctcaactctgtgagatgaatgcacacatcacaaggaagtttctcagatagctcttattattttgagatacgtcccatcaatacctaatttattgagagtttttaacatgaggggctgttgaattttgtaaaggccttttctgcatctattgggataatcatgtggtttttgtctttggttctgtttatatgctggattacatttattgatttgcatatattgaaccagctttgcattccagggatgaagcccacttgatcatcgtggataagcttcttgatgtgctgctggattcggtttgccagtattttattgaggatttttgcatcagtgttcatcaaggatattggtctaaaattctcttttttggttgtgtctctgcccggctttgttatcaggatggtgctggcttcataaaatgagttagggaggattccctctttttctattgattggaatagtttcagaaggaatggtaccagttcctccttgtaactctggtagaattcggctgtgaatccatctgatcctggactctttttggttggtaagctattgattatggccacaacttcagagcctgttattggtctatttagaaatccaacttcttcctggtttagtcttgagagggtgtatatgtcaaagaatttatccatttcttctagattttctagttgatttgcatagaggggtttgtagcattctctgatggtagtttgaatttctgtggggacggtggtcatatcctccttatcattttttattgcatctatttggttcttctcttttttcttctttattagtcttgctagcggtctatcaattttattgatcctttcaaaaaaccagctcctggattcattaattttttgaagggtttttttgtgtctctatttctttcagttctgctctgattttagttatttcttgccttctgctagcttttgaatgtgtttgctcttgcttttctagttcttttaattgtgatgttaggatgtcaattttagatcttttctgctttctcttgtgggcatttagtgctaaaaatttccctctaaacactgctttgaatgtgtcccagagattctggtatgttgtgtctttgttctcattggtttcatgctgctataaagacacatgcacgtgtatgtttattgcagcactattcacaatagcaaagacttggaaccaacccaaatgtccaacaatgatagactggattaagaaaatgtggcacatatacacatggaatactatggagcaataaaaaatgatgagttaatgtcctttgtagggacatgaatgaaattggaaatcatcattctcagtaaactatcacaaggacaaaaaaccaaacaccatgtgttctcactcataggtgagatttgaacaatgagaacacatggacacaggaaggggaacatcacactctggggactgttgtggggtggggggaggggggagggttagcattaggagatatacctaatgctaaatgatgagttaatgggtgcaggacaccagcgtggcacatgtatacatatgtaactaacctgcacattgtgcacatgtaccctaaaacttaaagtataataataataaaataaaataaaataaaataaagtgcacatcacaaagaagtttctcagaaagtttctttttagtttttatgtgaagatatttcctttttcaccatagtccacaaagtgcaccaaatatcttttgcagatgattgtacaaaaagagtttctccaaactgctcaatcaaaggaaagtttcatctctgtgagatgaaagcacaaatcacaaagaagttactcagaatgcttctgtctagtttttaaatgaaggtatttcctgttacaccataggcctcaaagggctcacagatatccttttgcagattctacaaaaagactgttacagaattgctcaatgaaaagtaagtttcaactctgtgagatgaattcacacctaaaaaaagaagtttctcagaatgcttctgtctagtttttatgtgaagatatttctttgtcaccataggcctcaaaccgctcagaaatatccctatgcagatgttacaaaaagactgtttccaaactgctcaatgaaaagaaagattctactctgtgagatgaaagcacatatcacaaagaattttctcagaaagtttttgtctagcttatatgtgaagacatttcctctttcaccataggcctcaatgggctcaaaaacgtctcttttcagatactacaaaaggcctctttccaaactgctcaatcaaaagaaagtttcaactctgtgagatgaaagcacacatcacaaataagtttctcagaatgtttgtctagttttatgtgaagatatttcctgtttcaccgtaggccataaaggactcacaaatatccctttgcagactctacaaaaagacagtttgcaaacagctcaatcaaaaacaaaggttcaactatgtgagacgaatggacacatcacaaagaagtttctcagaatgcttctgcctagtttttatgtgaagatatgtctttttcaccataggcctcaaatggctaagaaatatccctttgcagattgtacaaaaagactgtttccaaattgctcaatgaaaagacaggttcaactctatgagataaatgcacacatgaaaaagaagtttctcagaatgcttctgtctagtttttatctgacatagttatttttcaccataggcctcaaatggttcagaaatatccctttgcatattgtactaaaagactgtttccaaactgtcaaatgcaaagaaaggttcaactctgtgagatgaatgcaaacatcacaaagaagtttctcagaaagtttctgtctagtttttatgtgaagataattccttcttcacaataggcctcaaagtgctccaaatatccattttcagattacacaaaaagactgtttccaaacggctcaatcacaaaaaaagttcaactctgtgagatgaatgcacacatcataaagaagtttctcagaatgcttctgtctagttttgatgtgaagatatttcctttttcaccataggccttaaacgactcccaaatatccctctgcagatactacaaaaaggctgcttgaaaactgttcaatcaaaggaatccttcatctctgtgagatgaaaccacacatcacaaagaagttcctcataatgcttctgtctggtttttatgtgaagatatttcatatttcaccataggcctcaaagagctcacaaatatccctttgcagactctacaaaaagactgtttcaaactgctccatgcaaagaaaggttcaactctgtgagacgaatgcacacataaaaaagaagtttctcacaattcttctgtttagtttttatgtgaagatattcctttttcactataggcaccaaaccgttcagaaatatccctttgtagactacaaaaagactgtttccaaactgctcaatcaaaagaaagtttcaaacctgttagatgaaagcacacatcacaaagaagtttctcagaatacttctgtctagtttttatgtgaagatatttctttttcaccgtaggcctcaaacccctcagaaatatccctttgcagattgtagataaagactgcttcctaactgctcaatcaaaagaacagttcaactctgtgagatgaaagcacacgtcacaaagaagtttctcagaaatcttctgtctagtttttatgtgaagatatttcccttctaatgataggcctcaaagcaatccaattatcaatttgcagattctacaaaatactgtttccaaactgctcaatcaaaagaaattttcaactctgtgagatgaaagcatacatcacaaagaagttcttcagaaagtttctcactagattttatgtgaagatatttagtttttcaccacaagccacaaagtgctccaaatatccttttgcagatacttcaaaaagagtttttccaaactgctcaatcaaaacaaagtttcaactctgtgagaggaatgcaaacatcacaaagaagtttctcagaatgcttctgtctagttttcctttgaagatatttcccatttcaccatgggcctcagtgggctcacatatatcctcttccaaattctacaaaaagactgtttctgaatttctcaatgaagagaaaggttcaactctgggagatgaatgcacacatgaataagaagtttctcagaatgcctctgtctagtttttgtgttaagatatttgtttttcactgtaggcctcaaacttctcagaaatatccctttgaagattgtacaaaaagatggtttccaaactgctcaatgaaaacaaaggttcaacactgtgacatgaatactcacatcacagagaagtttttcagaaagcttctgtttagtctttaagtgaaaatatttcctttttcaccataggcctcaaagcaatccaaatatccttttgcaaactctacaaaaagagagtttccaaactgttcaattaaaaaaaagattcaaatctgtgagaagaaagcacacaacatgaagaagtttcccataatgcttctgtctactttttttgtgaagatatttcctatatcaccataggcctcaaagatctcacaaatatccctttgcagactctacaaaaagacagttttcggactgctaaatgaaaagaaaagttcaattctgtgagacgaatgcacacatattaattagtttatcataatgcttctgtctagtttttatgtgaagatatttctttttcaccataggcatcaaaccgttcagaattatccctttgtagattgtacaaaaagactgtttccaaactgctcaatcaaaagaaaggttcaaaccggtgagatgaatgcacacataaaagaggagtttctcagaaatcttctgtcttgtttttatgtgaagatattacctttctcaacataggcctcaaagcaatccaaatatccatttgcagattctataaaaagactgtttccaaactgatcaatcaaaacaaatttttacctctctgagatgaaagcacacatcacaaaaatgttactcagacagcttctctctagtatgtatgtgaagatacttcctatttcacctgaggccataaagggctcacaattatccctttgaaggttttacaaaaagactgtgtccaaactgctcaatcaaaagaaaggttcaactctgtgagatgaatgggcacatcacaaagaaatttcttggaatgattctgtctagtttttatgtgaagatatttctctttcaccataggcctcaaacggatcagaattatccatttgcagattgtacaataagcctctttccaacctgctcaatcaaaagaaaggttcaactctgtgagatgaatgcacacatcacaaggaagtttctcagaaaacttctgtttagtttttatgtgaagatatttcgtttttcaccatgggcctcaaaagctctccaaatatccatttgtagattttagaaaaagagtgtttccaaactcctcaatcaaaagacagtttcaactatgtgagatgaatgcacacatcacaaagaagtttctcagagtgcttctgtctagtttatatgtgaagaaaattcctatttcaccataggcaataaagggctcacaaatattttttgcagattctacaaaaatactgtatccaaagtgctaaataaaaagaaagtttcaactctgttagattaatggacacatcaaaaagtagtttctcagaaaacttctgtttagtttttacgtgaagatatttcctttgtcaccattggcctcaaagtgctctgaatatccatttacagatttcactaaaagagtgtttccaaactgctgaatcaaaagaaagttttaactctgtgagatgaaagcacacatctcaaagaagtttctcagaaagctttggtctagttttcatgtgaagatatttccagtttcaccacaggcctcaaagtgctaagaaatatacctttccagattctaaaagacgaccatttccatactgctcagtcaaaataaaggttaaattctgtgaggtgaatgcacacatcagaatgaagtttctcagaattctcctgtctagtttttatgtgaagatatttactatttcactataggcttcaaatgtctcaaaaatatccctttgcagattctacaaaaatatggtttccaaagtgctgaattaaaagaaaccttcaactctgtcagatgaatggagacatcacaaagaagttcctcagaattcttctgtctattttaaatgtgaagatatttcttttttcaccatagacctcaaatggctcagaaatatgcctttgcagattgcagaaaaagactgtttctaaactgctcaaacaaaataaagtttcaacactgttagatgaatgcgcacatcacaaagaagtttctcagaaagctactgtctcgtttttatgtgaagatatttcctttttcaccataggccttaaaccgctcacaaatatccttctgcagatactataaaaagactgtttccaaactgctccatcaaaagaaaagttcacctctctgaggtgaatgcatacatcacaaaaattttctcagaattcnnnnnnnnnnnnnnnnnnnnnnnnnnnnnnnnnnnnnnnnnnnnnnnnnnnnnnnnnnnnnnnnnnnnnnnnnnnnnnnnnnnnnnnnnnnnnnnnnnnnnnnnnnnnnnnnnnnnnnnnnnnnnnnnnnnnnnnnnnnnnnnnnnnnnnnnnnnnnnnnnnnnnnnnnnnnnnnnnnnnnnnnnnnnnnnnnnnnnnnnnnnnnnnnnnnnnnnnnnnnnnnnnnnnnnnnnnnnnnnnnnnnnnnnnnnnnnnnnnnnnnnnnnnnnnnnnnnnnnnnnnnnnnnnnnnnnnnnnnnnnnnnnnnnnnnnnnnnnnnnnnnnnnnnnnnnnnnnnnnnnnnnnnnnnnnnnnnnnnnnnnnnnnnnnnnnnnnnnnnnnnnnnnnnnnnnnnnnnnnnnnnnnnnnnnnnnnnnnnnnnnnnnnnnnnnnnnnnnnnnnnnnnnnnnnnnnnnnnnnnnnnnnnnnnnnnnnnnnnnnnnnnnnnnnnnnnnnnnnnnnnnnnnnnnnnnnnnnnnnnnnnnnnnnnnnnnnnnnnnnnnnnnnnnnnnnnnnnnnnnnnnnnnnnnnnnnnnnnnnnnnnnnnnnnnnnnnnnnnnnnnnnnnnnnnnnnnnnnnnnnnnnnnnnnnnnnnnnnnnnnnnnnnnnnnnnnnnnnnnnnnnnnnnnnnnnnnnnnnnnnnnnnnnnnnnnnnnnnnnnnnnnnnnnnnnnnnnnnnnnnnnnnnnnnnnnnnnnnnnnnnnnnnnnnnnnnnnnnnnnnnnnnnnnnnnnnnnnnnnnnnnnnnnnnnnnnnnnnnnnnnnnnnnnnnnnnnnnnnnnnnnnnnnnnnnnnnnnnnnnnnnnnnnnnnnnnnnnnnnnnnnnnnnnnnnnnnnnnnnnnnnnnnnnnnnnnnnnnnnnnnnnnnnnnnnnnnnnnnnnnnnnnnnnnnnnnnnnnnnnnnnnnnnnnnnnnnnnnnnnnnnnnnnnnnnnnnnnnnnnnnnnnnnnnnnnnnnnnnnnnnnnnnnnnnnnnnnnnnnnnnnnnnnnnnnnnnnnnnnnnnnnnnnnnnnnnnnnnnnnnnnnnnnnnnnnnnnnnnnnnnnnnnnnnnnnnnnnnnnnnnnnnnnnnnnnnnnnnnnnnnnnnnnnnnnnnnnnnnnnnnnnnnnnnnnnnnnnnnnnnnnnnnnnnnnnnnnnnnnnnnnnnnnnnnnnnnnnnnnnnnnnnnnnnnnnnnnnnnnnnnnnnnnnnnnnnnnnnnnnnnnnnnnnnnnnnnnnnnnnnnnnnnnnnnnnnnnnnnnnnnnnnnnnnnnnnnnnnnnnnnnnnnnnnnnnnnnnnnnnnnnnnnnnnnnnnnnnnnnnnnnnnnnnnnnnnnnnnnnnnnnnnnnnnnnnnnnnnnnnnnnnnnnnnnnnnnnnnnnnnnnnnnnnnnnnnnnnnnnnnnnnnnnnnnnnnnnnnnnnnnnnnnnnnnnnnnnnnnnnnnnnnnnnnnnnnnnnnnnnnnnnnnnnnnnnnnnnnnnnnnnnnnnnnnnnnnnnnnnnnnnnnnnnnnnnnnnnnnnnnnnnnnnnnnnnnnnnnnnnnnnnnnnnnnnnnnnnnnnnnnnnnnnnnnnnnnnnnnnnnnnnnnnnnnnnnnnnnnnnnnnnnnnnnnnnnnnnnnnnnnnnnnnnnnnnnnnnnnnnnnnnnnnnnnnnnnnnnnnnnnnnnnnnnnnnnnnnnnnnnnnnnnnnnnnnnnnnnnnnnnnnnnnnnnnnnnnnnnnnnnnnnnnnnnnnnnnnnnnnnnnnnnnnnnnnnnnnnnnnnnnnnnnnnnnnnnnnnnnnnnnnnnnnnnnnnnnnnnnnnnnnnnnnnnnnnnnnnnnnnnnnnnnnnnnnnnnnnnnnnnnnnnnnnnnnnnnnnnnnnnnnnnnnnnnnnnnnnnnnnnnnnnnnnnnnnnnnnnnnnnnnnnnnnnnnnnnnnnnnnnnnnnnnnnnnnnnnnnnnnnnnnnnnnnnnnnnnnnnnnnnnnnnnnnnnnnnnnnnnnnnnnnnnnnnnnnnnnnnnnnnnnnnnnnnnnnnnnnnnnnnnnnnnnnnnnnnnnnnnnnnnnnnnnnnnnnnnnnnnnnnnnnnnnnnnnnnnnnnnnnnnnnnnnnnnnnnnnnnnnnnnnnnnnnnnnnnnnnnnnnnnnnnnnnnnnnnnnnnnnnnnnnnnnnnnnnnnnnnnnnnnnnnnnnnnnnnnnnnnnnnnnnnnnnnnnnnnnnnnnnnnnnnnnnnnnnnnnnnnnnnnnnnnnnnnnnnnnnnnnnnnnnnnnnnnnnnnnnnnnnnnnnnnnnnnnnnnnnnnnnnnnnnnnnnnnnnnnnnnnnnnnnnnnnnnnnnnnnnnnnnnnnnnnnnnnnnnnnnnnnnnnnnnnnnnnnnnnnnnnnnnnnnnnnnnnnnnnnnnnnnnnnnnnnnnnnnnnnnnnnnnnnnnnnnnnnnnnnnnnnnnnnnnnnnnnnnnnnnnnnnnnnnnnnnnnnnnnnnnnnnnnnnnnnnnnnnnnnnnnnnnnnnnnnnnnnnnnnnnnnnnnnnnnnnnnnnnnnnnnnnnnnnnnnnnnnnnnnnnnnnnnnnnnnnnnnnnnnnnnnnnnnnnnnnnnnnnnnnnnnnnnnnnnnnnnnnnnnnnnnnnnnnnnnnnnnnnnnnnnnnnnnnnnnnnnnnnnnnnnnnnnnnnnnnnnnnnnnnnnnnnnnnnnnnnnnnnnnnnnnnnnnnnnnnnnnnnnnnnnnnnnnnnnnnnnnnnnnnnnnnnnnnnnnnnnnnnnnnnnnnnnnnnnnnnnnnnnnnnnnnnnnnnnnnnnnnnnnnnnnnnnnnnnnnnnnnnnnnnnnnnnnnnnnnnnnnnnnnnnnnnnnnnnnnnnnnnnnnnnnnnnnnnnnnnnnnnnnnnnnnnnnnnnnnnnnnnnnnnnnnnnnnnnnnnnnnnnnnnnnnnnnnnnnnnnnnnnnnnnnnnnnnnnnnnnnnnnnnnnnnnnnnnnnnnnnnnnnnnnnnnnnnnnnnnnnnnnnnnnnnnnnnnnnnnnnnnnnnnnnnnnnnnnnnnnnnnnnnnnnnnnnnnnnnnnnnnnnnnnnnnnnnnnnnnnnnnnnnnnnnnnnnnnnnnnnnnnnnnnnnnnnnnnnnnnnnnnnnnnnnnnnnnnnnnnnnnnnnnnnnnnnnnnnnnnnnnnnnnnnnnnnnnnnnnnnnnnnnnnnnnnnnnnnnnnnnnnnnnnnnnnnnnnnnnnnnnnnnnnnnnnnnnnnnnnnnnnnnnnnnnnnnnnnnnnnnnnnnnnnnnnnnnnnnnnnnnnnnnnnnnnnnnnnnnnnnnnnnnnnnnnnnnnnnnnnnnnnnnnnnnnnnnnnnnnnnnnnnnnnnnnnnnnnnnnnnnnnnnnnnnnnnnnnnnnnnnnnnnnnnnnnnnnnnnnnnnnnnnnnnnnnnnnnnnnnnnnnnnnnnnnnnnnnnnnnnnnnnnnnnnnnnnnnnnnnnnnnnnnnnnnnnnnnnnnnnnnnnnnnnnnnnnnnnnnnnnnnnnnnnnnnnnnnnnnnnnnnnnnnnnnnnnnnnnnnnnnnnnnnnnnnnnnnnnnnnnnnnnnnnnnnnnnnnnnnnnnnnnnnnnnnnnnnnnnnnnnnnnnnnnnnnnnnnnnnnnnnnnnnnnnnnnnnnnnnnnnnnnnnnnnnnnnnnnnnnnnnnnnnnnnnnnnnnnnnnnnnnnnnnnnnnnnnnnnnnnnnnnnnnnnnnnnnnnnnnnnnnnnnnnnnnnnnnnnnnnnnnnnnnnnnnnnnnnnnnnnnnnnnnnnnnnnnnnnnnnnnnnnnnnnnnnnnnnnnnnnnnnnnnnnnnnnnnnnnnnnnnnnnnnnnnnnnnnnnnnnnnnnnnnnnnnnnnnnnnnnnnnnnnnnnnnnnnnnnnnnnnnnnnnnnnnnnnnnnnnnnnnnnnnnnnnnnnnnnnnnnnnnnnnnnnnnnnnnnnnnnnnnnnnnnnnnnnnnnnnnnnnnnnnnnnnnnnnnnnnnnnnnnnnnnnnnnnnnnnnnnnnnnnnnnnnnnnnnnnnnnnnnnnnnnnnnnnnnnnnnnnnnnnnnnnnnnnnnnnnnnnnnnnnnnnnnnnnnnnnnnnnnnnnnnnnnnnnnnnnnnnnnnnnnnnnnnnnnnnnnnnnnnnnnnnnnnnnnnnnnnnnnnnnnnnnnnnnnnnnnnnnnnnnnnnnnnnnnnnnnnnnnnnnnnnnnnnnnnnnnnnnnnnnnnnnnnnnnnnnnnnnnnnnnnnnnnnnnnnnnnnnnnnnnnnnnnnnnnnnnnnnnnnnnnnnnnnnnnnnnnnnnnnnnnnnnnnnnnnnnnnnnnnnnnnnnnnnnnnnnnnnnnnnnnnnnnnnnnnnnnnnnnnnnnnnnnnnnnnnnnnnnnnnnnnnnnnnnnnnnnnnnnnnnnnnnnnnnnnnnnnnnnnnnnnnnnnnnnnnnnnnnnnnnnnnnnnnnnnnnnnnnnnnnnnnnnnnnnnnnnnnnnnnnnnnnnnnnnnnnnnnnnnnnnnnnnnnnnnnnnnnnnnnnnnnnnnnnnnnnnnnnnnnnnnnnnnnnnnnnnnnnnnnnnnnnnnnnnnnnnnnnnnnnnnnnnnnnnnnnnnnnnnnnnnnnnnnnnnnnnnnnnnnnnnnnnnnnnnnnnnnnnnnnnnnnnnnnnnnnnnnnnnnnnnnnnnnnnnnnnnnnnnnnnnnnnnnnnnnnnnnnnnnnnnnnnnnnnnnnnnnnnnnnnnnnnnnnnnnnnnnnnnnnnnnnnnnnnnnnnnnnnnnnnnnnnnnnnnnnnnnnnnnnnnnnnnnnnnnnnnnnnnnnnnnnnnnnnnnnnnnnnnnnnnnnnnnnnnnnnnnnnnnnnnnnnnnnnnnnnnnnnnnnnnnnnnnnnnnnnnnnnnnnnnnnnnnnnnnnnnnnnnnnnnnnnnnnnnnnnnnnnnnnnnnnnnnnnnnnnnnnnnnnnnnnnnnnnnnnnnnnnnnnnnnnnnnnnnnnnnnnnnnnnnnnnnnnnnnnnnnnnnnnnnnnnnnnnnnnnnnnnnnnnnnnnnnnnnnnnnnnnnnnnnnnnnnnnnnnnnnnnnnnnnnnnnnnnnnnnnnnnnnnnnnnnnnnnnnnnnnnnnnnnnnnnnnnnnnnnnnnnnnnnnnnnnnnnnnnnnnnnnnnnnnnnnnnnnnnnnnnnnnnnnnnnnnnnnnnnnnnnnnnnnnnnnnnnnnnnnnnnnnnnnnnnnnnnnnnnnnnnnnnnnnnnnnnnnnnnnnnnnnnnnnnnnnnnnnnnnnnnnnnnnnnnnnnnnnnnnnnnnnnnnnnnnnnnnnnnnnnnnnnnnnnnnnnnnnnnnnnnnnnnnnnnnnnnnnnnnnnnnnnnnnnnnnnnnnnnnnnnnnnnnnnnnnnnnnnnnnnnnnnnnnnnnnnnnnnnnnnnnnnnnnnnnnnnnnnnnnnnnnnnnnnnnnnnnnnnnnnnnnnnnnnnnnnnnnnnnnnnnnnnnnnnnnnnnnnnnnnnnnnnnnnnnnnnnnnnnnnnnnnnnnnnnnnnnnnnnnnnnnnnnnnnnnnnnnnnnnnnnnnnnnnnnnnnnnnnnnnnnnnnnnnnnnnnnnnnnnnnnnnnnnnnnnnnnnnnnnnnnnnnnnnnnnnnnnnnnnnnnnnnnnnnnnnnnnnnnnnnnnnnnnnnnnnnnnnnnnnnnnnnnnnnnnnnnnnnnnnnnnnnnnnnnnnnnnnnnnnnnnnnnnnnnnnnnnnnnnnnnnnnnnnnnnnnnnnnnnnnnnnnnnnnnnnnnnnnnnnnnnnnnnnnnnnnnnnnnnnnnnnnnnnnnnnnnnnnnnnnnnnnnnnnnnnnnnnnnnnnnnnnnnnnnnnnnnnnnnnnnnnnnnnnnnnnnnnnnnnnnnnnnnnnnnnnnnnnnnnnnnnnnnnnnnnnnnnnnnnnnnnnnnnnnnnnnnnnnnnnnnnnnnnnnnnnnnnnnnnnnnnnnnnnnnnnnnnnnnnnnnnnnnnnnnnnnnnnnnnnnnnnnnnnnnnnnnnnnnnnnnnnnnnnnnnnnnnnnnnnnnnnnnnnnnnnnnnnnnnnnnnnnnnnnnnnnnnnnnnnnnnnnnnnnnnnnnnnnnnnnnnnnnnnnnnnnnnnnnnnnnnnnnnnnnnnnnnnnnnnnnnnnnnnnnnnnnnnnnnnnnnnnnnnnnnnnnnnnnnnnnnnnnnnnnnnnnnnnnnnnnnnnnnnnnnnnnnnnnnnnnnnnnnnnnnnnnnnnnnnnnnnnnnnnnnnnnnnnnnnnnnnnnnnnnnnnnnnnnnnnnnnnnnnnnnnnnnnnnnnnnnnnnnnnnnnnnnnnnnnnnnnnnnnnnnnnnnnnnnnnnnnnnnnnnnnnnnnnnnnnnnnnnnnnnnnnnnnnnnnnnnnnnnnnnnnnnnnnnnnnnnnnnnnnnnnnnnnnnnnnnnnnnnnnnnnnnnnnnnnnnnnnnnnnnnnnnnnnnnnnnnnnnnnnnnnnnnnnnnnnnnnnnnnnnnnnnnnnnnnnnnnnnnnnnnnnnnnnnnnnnnnnnnnnnnnnnnnnnnnnnnnnnnnnnnnnnnnnnnnnnnnnnnnnnnnnnnnnnnnnnnnnnnnnnnnnnnnnnnnnnnnnnnnnnnnnnnnnnnnnnnnnnnnnnnnnnnnnnnnnnnnnnnnnnnnnnnnnnnnnnnnnnnnnnnnnnnnnnnnnnnnnnnnnnnnnnnnnnnnnnnnnnnnnnnnnnnnnnnnnnnnnnnnnnnnnnnnnnnnnnnnnnnnnnnnnnnnnnnnnnnnnnnnnnnnnnnnnnnnnnnnnnnnnnnnnnnnnnnnnnnnnnnnnnnnnnnnnnnnnnnnnnnnnnnnnnnnnnnnnnnnnnnnnnnnnnnnnnnnnnnnnnnnnnnnnnnnnnnnnnnnnnnnnnnnnnnnnnnnnnnnnnnnnnnnnnnnnnnnnnnnnnnnnnnnnnnnnnnnnnnnnnnnnnnnnnnnnnnnnnnnnnnnnnnnnnnnnnnnnnnnnnnnnnnnnnnnnnnnnnnnnnnnnnnnnnnnnnnnnnnnnnnnnnnnnnnnnnnnnnnnnnnnnnnnnnnnnnnnnnnnnnnnnnnnnnnnnnnnnnnnnnnnnnnnnnnnnnnnnnnnnnnnnnnnnnnnnnnnnnnnnnnnnnnnnnnnnnnnnnnnnnnnnnnnnnnnnnnnnnnnnnnnnnnnnnnnnnnnnnnnnnnnnnnnnnnnnnnnnnnnnnnnnnnnnnnnnnnnnnnnnnnnnnnnnnnnnnnnnnnnnnnnnnnnnnnnnnnnnnnnnnnnnnnnnnnnnnnnnnnnnnnnnnnnnnnnnnnnnnnnnnnnnnnnnnnnnnnnnnnnnnnnnnnnnnnnnnnnnnnnnnnnnnnnnnnnnnnnnnnnnnnnnnnnnnnnnnnnnnnnnnnnnnnnnnnnnnnnnnnnnnnnnnnnnnnnnnnnnnnnnnnnnnnnnnnnnnnnnnnnnnnnnnnnnnnnnnnnnnnnnnnnnnnnnnnnnnnnnnnnnnnnnnnnnnnnnnnnnnnnnnnnnnnnnnnnnnnnnnnnnnnnnnnnnnnnnnnnnnnnnnnnnnnnnnnnnnnnnnnnnnnnnnnnnnnnnnnnnnnnnnnnnnnnnnnnnnnnnnnnnnnnnnnnnnnnnnnnnnnnnnnnnnnnnnnnnnnnnnnnnnnnnnnnnnnnnnnnnnnnnnnnnnnnnnnnnnnnnnnnnnnnnnnnnnnnnnnnnnnnnnnnnnnnnnnnnnnnnnnnnnnnnnnnnnnnnnnnnnnnnnnnnnnnnnnnnnnnnnnnnnnnnnnnnnnnnnnnnnnnnnnnnnnnnnnnnnnnnnnnnnnnnnnnnnnnnnnnnnnnnnnnnnnnnnnnnnnnnnnnnnnnnnnnnnnnnnnnnnnnnnnnnnnnnnnnnnnnnnnnnnnnnnnnnnnnnnnnnnnnnnnnnnnnnnnnnnnnnnnnnnnnnnnnnnnnnnnnnnnnnnnnnnnnnnnnnnnnnnnnnnnnnnnnnnnnnnnnnnnnnnnnnnnnnnnnnnnnnnnnnnnnnnnnnnnnnnnnnnnnnnnnnnnnnnnnnnnnnnnnnnnnnnnnnnnnnnnnnnnnnnnnnnnnnnnnnnnnnnnnnnnnnnnnnnnnnnnnnnnnnnnnnnnnnnnnnnnnnnnnnnnnnnnnnnnnnnnnnnnnnnnnnnnnnnnnnnnnnnnnnnnnnnnnnnnnnnnnnnnnnnnnnnnnnnnnnnnnnnnnnnnnnnnnnnnnnnnnnnnnnnnnnnnnnnnnnnnnnnnnnnnnnnnnnnnnnnnnnnnnnnnnnnnnnnnnnnnnnnnnnnnnnnnnnnnnnnnnnnnnnnnnnnnnnnnnnnnnnnnnnnnnnnnnnnnnnnnnnnnnnnnnnnnnnnnnnnnnnnnnnnnnnnnnnnnnnnnnnnnnnnnnnnnnnnnnnnnnnnnnnnnnnnnnnnnnnnnnnnnnnnnnnnnnnnnnnnnnnnnnnnnnnnnnnnnnnnnnnnnnnnnnnnnnnnnnnnnnnnnnnnnnnnnnnnnnnnnnnnnnnnnnnnnnnnnnnnnnnnnnnnnnnnnnnnnnnnnnnnnnnnnnnnnnnnnnnnnnnnnnnnnnnnnnnnnnnnnnnnnnnnnnnnnnnnnnnnnnnnnnnnnnnnnnnnnnnnnnnnnnnnnnnnnnnnnnnnnnnnnnnnnnnnnnnnnnnnnnnnnnnnnnnnnnnnnnnnnnnnnnnnnnnnnnnnnnnnnnnnnnnnnnnnnnnnnnnnnnnnnnnnnnnnnnnnnnnnnnnnnnnnnnnnnnnnnnnnnnnnnnnnnnnnnnnnnnnnnnnnnnnnnnnnnnnnnnnnnnnnnnnnnnnnnnnnnnnnnnnnnnnnnnnnnnnnnnnnnnnnnnnnnnnnnnnnnnnnnnnnnnnnnnnnnnnnnnnnnnnnnnnnnnnnnnnnnnnnnnnnnnnnnnnnnnnnnnnnnnnnnnnnnnnnnnnnnnnnnnnnnnnnnnnnnnnnnnnnnnnnnnnnnnnnnnnnnnnnnnnnnnnnnnnnnnnnnnnnnnnnnnnnnnnnnnnnnnnnnnnnnnnnnnnnnnnnnnnnnnnnnnnnnnnnnnnnnnnnnnnnnnnnnnnnnnnnnnnnnnnnnnnnnnnnnnnnnnnnnnnnnnnnnnnnnnnnnnnnnnnnnnnnnnnnnnnnnnnnnnnnnnnnnnnnnnnnnnnnnnnnnnnnnnnnnnnnnnnnnnnnnnnnnnnnnnnnnnnnnnnnnnnnnnnnnnnnnnnnnnnnnnnnnnnnnnnnnnnnnnnnnnnnnnnnnnnnnnnnnnnnnnnnnnnnnnnnnnnnnnnnnnnnnnnnnnnnnnnnnnnnnnnnnnnnnnnnnnnnnnnnnnnnnnnnnnnnnnnnnnnnnnnnnnnnnnnnnnnnnnnnnnnnnnnnnnnnnnnnnnnnnnnnnnnnnnnnnnnnnnnnnnnnnnnnnnnnnnnnnnnnnnnnnnnnnnnnnnnnnnnnnnnnnnnnnnnnnnnnnnnnnnnnnnnnnnnnnnnnnnnnnnnnnnnnnnnnnnnnnnnnnnnnnnnnnnnnnnnnnnnnnnnnnnnnnnnnnnnnnnnnnnnnnnnnnnnnnnnnnnnnnnnnnnnnnnnnnnnnnnnnnnnnnnnnnnnnnnnnnnnnnnnnnnnnnnnnnnnnnnnnnnnnnnnnnnnnnnnnnnnnnnnnnnnnnnnnnnnnnnnnnnnnnnnnnnnnnnnnnnnnnnnnnnnnnnnnnnnnnnnnnnnnnnnnnnnnnnnnnnnnnnnnnnnnnnnnnnnnnnnnnnnnnnnnnnnnnnnnnnnnnnnnnnnnnnnnnnnnnnnnnnnnnnnnnnnnnnnnnnnnnnnnnnnnnnnnnnnnnnnnnnnnnnnnnnnnnnnnnnnnnnnnnnnnnnnnnnnnnnnnnnnnnnnnnnnnnnnnnnnnnnnnnnnnnnnnnnnnnnnnnnnnnnnnnnnnnnnnnnnnnnnnnnnnnnnnnnnnnnnnnnnnnnnnnnnnnnnnnnnnnnnnnnnnnnnnnnnnnnnnnnnnnnnnnnnnnnnnnnnnnnnnnnnnnnnnnnnnnnnnnnnnnnnnnnnnnnnnnnnnnnnnnnnnnnnnnnnnnnnnnnnnnnnnnnnnnnnnnnnnnnnnnnnnnnnnnnnnnnnnnnnnnnnnnnnnnnnnnnnnnnnnnnnnnnnnnnnnnnnnnnnnnnnnnnnnnnnnnnnnnnnnnnnnnnnnnnnnnnnnnnnnnnnnnnnnnnnnnnnnnnnnnnnnnnnnnnnnnnnnnnnnnnnnnnnnnnnnnnnnnnnnnnnnnnnnnnnnnnnnnnnnnnnnnnnnnnnnnnnnnnnnnnnnnnnnnnnnnnnnnnnnnnnnnnnnnnnnnnnnnnnnnnnnnnnnnnnnnnnnnnnnnnnnnnnnnnnnnnnnnnnnnnnnnnnnnnnnnnnnnnnnnnnnnnnnnnnnnnnnnnnnnnnnnnnnnnnnnnnnnnnnnnnnnnnnnnnnnnnnnnnnnnnnnnnnnnnnnnnnnnnnnnnnnnnnnnnnnnnnnnnnnnnnnnnnnnnnnnnnnnnnnnnnnnnnnnnnnnnnnnnnnnnnnnnnnnnnnnnnnnnnnnnnnnnnnnnnnnnnnnnnnnnnnnnnnnnnnnnnnnnnnnnnnnnnnnnnnnnnnnnnnnnnnnnnnnnnnnnnnnnnnnnnnnnnnnnnnnnnnnnnnnnnnnnnnnnnnnnnnnnnnnnnnnnnnnnnnnnnnnnnnnnnnnnnnnnnnnnnnnnnnnnnnnnnnnnnnnnnnnnnnnnnnnnnnnnnnnnnnnnnnnnnnnnnnnnnnnnnnnnnnnnnnnnnnnnnnnnnnnnnnnnnnnnnnnnnnnnnnnnnnnnnnnnnnnnnnnnnnnnnnnnnnnnnnnnnnnnnnnnnnnnnnnnnnnnnnnnnnnnnnnnnnnnnnnnnnnnnnnnnnnnnnnnnnnnnnnnnnnnnnnnnnnnnnnnnnnnnnnnnnnnnnnnnnnnnnnnnnnnnnnnnnnnnnnnnnnnnnnnnnnnnnnnnnnnnnnnnnnnnnnnnnnnnnnnnnnnnnnnnnnnnnnnnnnnnnnnnnnnnnnnnnnnnnnnnnnnnnnnnnnnnnnnnnnnnnnnnnnnnnnnnnnnnnnnnnnnnnnnnnnnnnnnnnnnnnnnnnnnnnnnnnnnnnnnnnnnnnnnnnnnnnnnnnnnnnnnnnnnnnnnnnnnnnnnnnnnnnnnnnnnnnnnnnnnnnnnnnnnnnnnnnnnnnnnnnnnnnnnnnnnnnnnnnnnnnnnnnnnnnnnnnnnnnnnnnnnnnnnnnnnnnnnnnnnnnnnnnnnnnnnnnnnnnnnnnnnnnnnnnnnnnnnnnnnnnnnnnnnnnnnnnnnnnnnnnnnnnnnnnnnnnnnnnnnnnnnnnnnnnnnnnnnnnnnnnnnnnnnnnnnnnnnnnnnnnnnnnnnnnnnnnnnnnnnnnnnnnnnnnnnnnnnnnnnnnnnnnnnnnnnnnnnnnnnnnnnnnnnnnnnnnnnnnnnnnnnnnnnnnnnnnnnnnnnnnnnnnnnnnnnnnnnnnnnnnnnnnnnnnnnnnnnnnnnnnnnnnnnnnnnnnnnnnnnnnnnnnnnnnnnnnnnnnnnnnnnnnnnnnnnnnnnnnnnnnnnnnnnnnnnnnnnnnnnnnnnnnnnnnnnnnnnnnnnnnnnnnnnnnnnnnnnnnnnnnnnnnnnnnnnnnnnnnnnnnnnnnnnnnnnnnnnnnnnnnnnnnnnnnnnnnnnnnnnnnnnnnnnnnnnnnnnnnnnnnnnnnnnnnnnnnnnnnnnnnnnnnnnnnnnnnnnnnnnnnnnnnnnnnnnnnnnnnnnnnnnnnnnnnnnnnnnnnnnnnnnnnnnnnnnnnnnnnnnnnnnnnnnnnnnnnnnnnnnnnnnnnnnnnnnnnnnnnnnnnnnnnnnnnnnnnnnnnnnnnnnnnnnnnnnnnnnnnnnnnnnnnnnnnnnnnnnnnnnnnnnnnnnnnnnnnnnnnnnnnnnnnnnnnnnnnnnnnnnnnnnnnnnnnnnnnnnnnnnnnnnnnnnnnnnnnnnnnnnnnnnnnnnnnnnnnnnnnnnnnnnnnnnnnnnnnnnnnnnnnnnnnnnnnnnnnnnnnnnnnnnnnnnnnnnnnnnnnnnnnnnnnnnnnnnnnnnnnnnnnnnnnnnnnnnnnnnnnnnnnnnnnnnnnnnnnnnnnnnnnnnnnnnnnnnnnnnnnnnnnnnnnnnnnnnnnnnnnnnnnnnnnnnnnnnnnnnnnnnnnnnnnnnnnnnnnnnnnnnnnnnnnnnnnnnnnnnnnnnnnnnnnnnnnnnnnnnnnnnnnnnnnnnnnnnnnnnnnnnnnnnnnnnnnnnnnnnnnnnnnnnnnnnnnnnnnnnnnnnnnnnnnnnnnnnnnnnnnnnnnnnnnnnnnnnnnnnnnnnnnnnnnnnnnnnnnnnnnnnnnnnnnnnnnnnnnnnnnnnnnnnnnnnnnnnnnnnnnnnnnnnnnnnnnnnnnnnnnnnnnnnnnnnnnnnnnnnnnnnnnnnnnnnnnnnnnnnnnnnnnnnnnnnnnnnnnnnnnnnnnnnnnnnnnnnnnnnnnnnnnnnnnnnnnnnnnnnnnnnnnnnnnnnnnnnnnnnnnnnnnnnnnnnnnnnnnnnnnnnnnnnnnnnnnnnnnnnnnnnnnnnnnnnnnnnnnnnnnnnnnnnnnnnnnnnnnnnnnnnnnnnnnnnnnnnnnnnnnnnnnnnnnnnnnnnnnnnnnnnnnnnnnnnnnnnnnnnnnnnnnnnnnnnnnnnnnnnnnnnnnnnnnnnnnnnnnnnnnnnnnnnnnnnnnnnnnnnnnnnnnnnnnnnnnnnnnnnnnnnnnnnnnnnnnnnnnnnnnnnnnnnnnnnnnnnnnnnnnnnnnnnnnnnnnnnnnnnnnnnnnnnnnnnnnnnnnnnnnnnnnnnnnnnnnnnnnnnnnnnnnnnnnnnnnnnnnnnnnnnnnnnnnnnnnnnnnnnnnnnnnnnnnnnnnnnnnnnnnnnnnnnnnnnnnnnnnnnnnnnnnnnnnnnnnnnnnnnnnnnnnnnnnnnnnnnnnnnnnnnnnnnnnnnnnnnnnnnnnnnnnnnnnnnnnnnnnnnnnnnnnnnnnnnnnnnnnnnnnnnnnnnnnnnnnnnnnnnnnnnnnnnnnnnnnnnnnnnnnnnnnnnnnnnnnnnnnnnnnnnnnnnnnnnnnnnnnnnnnnnnnnnnnnnnnnnnnnnnnnnnnnnnnnnnnnnnnnnnnnnnnnnnnnnnnnnnnnnnnnnnnnnnnnnnnnnnnnnnnnnnnnnnnnnnnnnnnnnnnnnnnnnnnnnnnnnnnnnnnnnnnnnnnnnnnnnnnnnnnnnnnnnnnnnnnnnnnnnnnnnnnnnnnnnnnnnnnnnnnnnnnnnnnnnnnnnnnnnnnnnnnnnnnnnnnnnnnnnnnnnnnnnnnnnnnnnnnnnnnnnnnnnnnnnnnnnnnnnnnnnnnnnnnnnnnnnnnnnnnnnnnnnnnnnnnnnnnnnnnnnnnnnnnnnnnnnnnnnnnnnnnnnnnnnnnnnnnnnnnnnnnnnnnnnnnnnnnnnnnnnnnnnnnnnnnnnnnnnnnnnnnnnnnnnnnnnnnnnnnnnnnnnnnnnnnnnnnnnnnnnnnnnnnnnnnnnnnnnnnnnnnnnnnnnnnnnnnnnnnnnnnnnnnnnnnnnnnnnnnnnnnnnnnnnnnnnnnnnnnnnnnnnnnnnnnnnnnnnnnnnnnnnnnnnnnnnnnnnnnnnnnnnnnnnnnnnnnnnnnnnnnnnnnnnnnnnnnnnnnnnnnnnnnnnnnnnnnnnnnnnnnnnnnnnnnnnnnnnnnnnnnnnnnnnnnnnnnnnnnnnnnnnnnnnnnnnnnnnnnnnnnnnnnnnnnnnnnnnnnnnnnnnnnnnnnnnnnnnnnnnnnnnnnnnnnnnnnnnnnnnnnnnnnnnnnnnnnnnnnnnnnnnnnnnnnnnnnnnnnnnnnnnnnnnnnnnnnnnnnnnnnnnnnnnnnnnnnnnnnnnnnnnnnnnnnnnnnnnnnnnnnnnnnnnnnnnnnnnnnnnnnnnnnnnnnnnnnnnnnnnnnnnnnnnnnnnnnnnnnnnnnnnnnnnnnnnnnnnnnnnnnnnnnnnnnnnnnnnnnnnnnnnnnnnnnnnnnnnnnnnnnnnnnnnnnnnnnnnnnnnnnnnnnnnnnnnnnnnnnnnnnnnnnnnnnnnnnnnnnnnnnnnnnnnnnnnnnnnnnnnnnnnnnnnnnnnnnnnnnnnnnnnnnnnnnnnnnnnnnnnnnnnnnnnnnnnnnnnnnnnnnnnnnnnnnnnnnnnnnnnnnnnnnnnnnnnnnnnnnnnnnnnnnnnnnnnnnnnnnnnnnnnnnnnnnnnnnnnnnnnnnnnnnnnnnnnnnnnnnnnnnnnnnnnnnnnnnnnnnnnnnnnnnnnnnnnnnnnnnnnnnnnnnnnnnnnnnnnnnnnnnnnnnnnnnnnnnnnnnnnnnnnnnnnnnnnnnnnnnnnnnnnnnnnnnnnnnnnnnnnnnnnnnnnnnnnnnnnnnnnnnnnnnnnnnnnnnnnnnnnnnnnnnnnnnnnnnnnnnnnnnnnnnnnnnnnnnnnnnnnnnnnnnnnnnnnnnnnnnnnnnnnnnnnnnnnnnnnnnnnnnnnnnnnnnnnnnnnnnnnnnnnnnnnnnnnnnnnnnnnnnnnnnnnnnnnnnnnnnnnnnnnnnnnnnnnnnnnnnnnnnnnnnnnnnnnnnnnnnnnnnnnnnnnnnnnnnnnnnnnnnnnnnnnnnnnnnnnnnnnnnnnnnnnnnnnnnnnnnnnnnnnnnnnnnnnnnnnnnnnnnnnnnnnnnnnnnnnnnnnnnnnnnnnnnnnnnnnnnnnnnnnnnnnnnnnnnnnnnnnnnnnnnnnnnnnnnnnnnnnnnnnnnnnnnnnnnnnnnnnnnnnnnnnnnnnnnnnnnnnnnnnnnnnnnnnnnnnnnnnnnnnnnnnnnnnnnnnnnnnnnnnnnnnnnnnnnnnnnnnnnnnnnnnnnnnnnnnnnnnnnnnnnnnnnnnnnnnnnnnnnnnnnnnnnnnnnnnnnnnnnnnnnnnnnnnnnnnnnnnnnnnnnnnnnnnnnnnnnnnnnnnnnnnnnnnnnnnnnnnnnnnnnnnnnnnnnnnnnnnnnnnnnnnnnnnnnnnnnnnnnnnnnnnnnnnnnnnnnnnnnnnnnnnnnnnnnnnnnnnnnnnnnnnnnnnnnnnnnnnnnnnnnnnnnnnnnnnnnnnnnnnnnnnnnnnnnnnnnnnnnnnnnnnnnnnnnnnnnnnnnnnnnnnnnnnnnnnnnnnnnnnnnnnnnnnnnnnnnnnnnnnnnnnnnnnnnnnnnnnnnnnnnnnnnnnnnnnnnnnnnnnnnnnnnnnnnnnnnnnnnnnnnnnnnnnnnnnnnnnnnnnnnnnnnnnnnnnnnnnnnnnnnnnnnnnnnnnnnnnnnnnnnnnnnnnnnnnnnnnnnnnnnnnnnnnnnnnnnnnnnnnnnnnnnnnnnnnnnnnnnnnnnnnnnnnnnnnnnnnnnnnnnnnnnnnnnnnnnnnnnnnnnnnnnnnnnnnnnnnnnnnnnnnnnnnnnnnnnnnnnnnnnnnnnnnnnnnnnnnnnnnnnnnnnnnnnnnnnnnnnnnnnnnnnnnnnnnnnnnnnnnnnnnnnnnnnnnnnnnnnnnnnnnnnnnnnnnnnnnnnnnnnnnnnnnnnnnnnnnnnnnnnnnnnnnnnnnnnnnnnnnnnnnnnnnnnnnnnnnnnnnnnnnnnnnnnnnnnnnnnnnnnnnnnnnnnnnnnnnnnnnnnnnnnnnnnnnnnnnnnnnnnnnnnnnnnnnnnnnnnnnnnnnnnnnnnnnnnnnnnnnnnnnnnnnnnnnnnnnnnnnnnnnnnnnnnnnnnnnnnnnnnnnnnnnnnnnnnnnnnnnnnnnnnnnnnnnnnnnnnnnnnnnnnnnnnnnnnnnnnnnnnnnnnnnnnnnnnnnnnnnnnnnnnnnnnnnnnnnnnnnnnnnnnnnnnnnnnnnnnnnnnnnnnnnnnnnnnnnnnnnnnnnnnnnnnnnnnnnnnnnnnnnnnnnnnnnnnnnnnnnnnnnnnnnnnnnnnnnnnnnnnnnnnnnnnnnnnnnnnnnnnnnnnnnnnnnnnnnnnnnnnnnnnnnnnnnnnnnnnnnnnnnnnnnnnnnnnnnnnnnnnnnnnnnnnnnnnnnnnnnnnnnnnnnnnnnnnnnnnnnnnnnnnnnnnnnnnnnnnnnnnnnnnnnnnnnnnnnnnnnnnnnnnnnnnnnnnnnnnnnnnnnnnnnnnnnnnnnnnnnnnnnnnnnnnnnnnnnnnnnnnnnnnnnnnnnnnnnnnnnnnnnnnnnnnnnnnnnnnnnnnnnnnnnnnnnnnnnnnnnnnnnnnnnnnnnnnnnnnnnnnnnnnnnnnnnnnnnnnnnnnnnnnnnnnnnnnnnnnnnnnnnnnnnnnnnnnnnnnnnnnnnnnnnnnnnnnnnnnnnnnnnnnnnnnnnnnnnnnnnnnnnnnnnnnnnnnnnnnnnnnnnnnnnnnnnnnnnnnnnnnnnnnnnnnnnnnnnnnnnnnnnnnnnnnnnnnnnnnnnnnnnnnnnnnnnnnnnnnnnnnnnnnnnnnnnnnnnnnnnnnnnnnnnnnnnnnnnnnnnnnnnnnnnnnnnnnnnnnnnnnnnnnnnnnnnnnnnnnnnnnnnnnnnnnnnnnnnnnnnnnnnnnnnnnnnnnnnnnnnnnnnnnnnnnnnnnnnnnnnnnnnnnnnnnnnnnnnnnnnnnnnnnnnnnnnnnnnnnnnnnnnnnnnnnnnnnnnnnnnnnnnnnnnnnnnnnnnnnnnnnnnnnnnnnnnnnnnnnnnnnnnnnnnnnnnnnnnnnnnnnnnnnnnnnnnnnnnnnnnnnnnnnnnnnnnnnnnnnnnnnnnnnnnnnnnnnnnnnnnnnnnnnnnnnnnnnnnnnnnnnnnnnnnnnnnnnnnnnnnnnnnnnnnnnnnnnnnnnnnnnnnnnnnnnnnnnnnnnnnnnnnnnnnnnnnnnnnnnnnnnnnnnnnnnnnnnnnnnnnnnnnnnnnnnnnnnnnnnnnnnnnnnnnnnnnnnnnnnnnnnnnnnnnnnnnnnnnnnnnnnnnnnnnnnnnnnnnnnnnnnnnnnnnnnnnnnnnnnnnnnnnnnnnnnnnnnnnnnnnnnnnnnnnnnnnnnnnnnnnnnnnnnnnnnnnnnnnnnnnnnnnnnnnnnnnnnnnnnnnnnnnnnnnnnnnnnnnnnnnnnnnnnnnnnnnnnnnnnnnnnnnnnnnnnnnnnnnnnnnnnnnnnnnnnnnnnnnnnnnnnnnnnnnnnnnnnnnnnnnnnnnnnnnnnnnnnnnnnnnnnnnnnnnnnnnnnnnnnnnnnnnnnnnnnnnnnnnnnnnnnnnnnnnnnnnnnnnnnnnnnnnnnnnnnnnnnnnnnnnnnnnnnnnnnnnnnnnnnnnnnnnnnnnnnnnnnnnnnnnnnnnnnnnnnnnnnnnnnnnnnnnnnnnnnnnnnnnnnnnnnnnnnnnnnnnnnnnnnnnnnnnnnnnnnnnnnnnnnnnnnnnnnnnnnnnnnnnnnnnnnnnnnnnnnnnnnnnnnnnnnnnnnnnnnnnnnnnnnnnnnnnnnnnnnnnnnnnnnnnnnnnnnnnnnnnnnnnnnnnnnnnnnnnnnnnnnnnnnnnnnnnnnnnnnnnnnnnnnnnnnnnnnnnnnnnnnnnnnnnnnnnnnnnnnnnnnnnnnnnnnnnnnnnnnnnnnnnnnnnnnnnnnnnnnnnnnnnnnnnnnnnnnnnnnnnnnnnnnnnnnnnnnnnnnnnnnnnnnnnnnnnnnnnnnnnnnnnnnnnnnnnnnnnnnnnnnnnnnnnnnnnnnnnnnnnnnnnnnnnnnnnnnnnnnnnnnnnnnnnnnnnnnnnnnnnnnnnnnnnnnnnnnnnnnnnnnnnnnnnnnnnnnnnnnnnnnnnnnnnnnnnnnnnnnnnnnnnnnnnnnnnnnnnnnnnnnnnnnnnnnnnnnnnnnnnnnnnnnnnnnnnnnnnnnnnnnnnnnnnnnnnnnnnnnnnnnnnnnnnnnnnnnnnnnnnnnnnnnnnnnnnnnnnnnnnnnnnnnnnnnnnnnnnnnnnnnnnnnnnnnnnnnnnnnnnnnnnnnnnnnnnnnnnnnnnnnnnnnnnnnnnnnnnnnnnnnnnnnnnnnnnnnnnnnnnnnnnnnnnnnnnnnnnnnnnnnnnnnnnnnnnnnnnnnnnnnnnnnnnnnnnnnnnnnnnnnnnnnnnnnnnnnnnnnnnnnnnnnnnnnnnnnnnnnnnnnnnnnnnnnnnnnnnnnnnnnnnnnnnnnnnnnnnnnnnnnnnnnnnnnnnnnnnnnnnnnnnnnnnnnnnnnnnnnnnnnnnnnnnnnnnnnnnnnnnnnnnnnnnnnnnnnnnnnnnnnnnnnnnnnnnnnnnnnnnnnnnnnnnnnnnnnnnnnnnnnnnnnnnnnnnnnnnnnnnnnnnnnnnnnnnnnnnnnnnnnnnnnnnnnnnnnnnnnnnnnnnnnnnnnnnnnnnnnnnnnnnnnnnnnnnnnnnnnnnnnnnnnnnnnnnnnnnnnnnnnnnnnnnnnnnnnnnnnnnnnnnnnnnnnnnnnnnnnnnnnnnnnnnnnnnnnnnnnnnnnnnnnnnnnnnnnnnnnnnnnnnnnnnnnnnnnnnnnnnnnnnnnnnnnnnnnnnnnnnnnnnnnnnnnnnnnnnnnnnnnnnnnnnnnnnnnnnnnnnnnnnnnnnnnnnnnnnnnnnnnnnnnnnnnnnnnnnnnnnnnnnnnnnnnnnnnnnnnnnnnnnnnnnnnnnnnnnnnnnnnnnnnnnnnnnnnnnnnnnnnnnnnnnnnnnnnnnnnnnnnnnnnnnnnnnnnnnnnnnnnnnnnnnnnnnnnnnnnnnnnnnnnnnnnnnnnnnnnnnnnnnnnnnnnnnnnnnnnnnnnnnnnnnnnnnnnnnnnnnnnnnnnnnnnnnnnnnnnnnnnnnnnnnnnnnnnnnnnnnnnnnnnnnnnnnnnnnnnnnnnnnnnnnnnnnnnnnnnnnnnnnnnnnnnnnnnnnnnnnnnnnnnnnnnnnnnnnnnnnnnnnnnnnnnnnnnnnnnnnnnnnnnnnnnnnnnnnnnnnnnnnnnnnnnnnnnnnnnnnnnnnnnnnnnnnnnnnnnnnnnnnnnnnnnnnnnnnnnnnnnnnnnnnnnnnnnnnnnnnnnnnnnnnnnnnnnnnnnnnnnnnnnnnnnnnnnnnnnnnnnnnnnnnnnnnnnnnnnnnnnnnnnnnnnnnnnnnnnnnnnnnnnnnnnnnnnnnnnnnnnnnnnnnnnnnnnnnnnnnnnnnnnnnnnnnnnnnnnnnnnnnnnnnnnnnnnnnnnnnnnnnnnnnnnnnnnnnnnnnnnnnnnnnnnnnnnnnnnnnnnnnnnnnnnnnnnnnnnnnnnnnnnnnnnnnnnnnnnnnnnnnnnnnnnnnnnnnnnnnnnnnnnnnnnnnnnnnnnnnnnnnnnnnnnnnnnnnnnnnnnnnnnnnnnnnnnnnnnnnnnnnnnnnnnnnnnnnnnnnnnnnnnnnnnnnnnnnnnnnnnnnnnnnnnnnnnnnnnnnnnnnnnnnnnnnnnnnnnnnnnnnnnnnnnnnnnnnnnnnnnnnnnnnnnnnnnnnnnnnnnnnnnnnnnnnnnnnnnnnnnnnnnnnnnnnnnnnnnnnnnnnnnnnnnnnnnnnnnnnnnnnnnnnnnnnnnnnnnnnnnnnnnnnnnnnnnnnnnnnnnnnnnnnnnnnnnnnnnnnnnnnnnnnnnnnnnnnnnnnnnnnnnnnnnnnnnnnnnnnnnnnnnnnnnnnnnnnnnnnnnnnnnnnnnnnnnnnnnnnnnnnnnnnnnnnnnnnnnnnnnnnnnnnnnnnnnnnnnnnnnnnnnnnnnnnnnnnnnnnnnnnnnnnnnnnnnnnnnnnnnnnnnnnnnnnnnnnnnnnnnnnnnnnnnnnnnnnnnnnnnnnnnnnnnnnnnnnnnnnnnnnnnnnnnnnnnnnnnnnnnnnnnnnnnnnnnnnnnnnnnnnnnnnnnnnnnnnnnnnnnnnnnnnnnnnnnnnnnnnnnnnnnnnnnnnnnnnnnnnnnnnnnnnnnnnnnnnnnnnnnnnnnnnnnnnnnnnnnnnnnnnnnnnnnnnnnnnnnnnnnnnnnnnnnnnnnnnnnnnnnnnnnnnnnnnnnnnnnnnnnnnnnnnnnnnnnnnnnnnnnnnnnnnnnnnnnnnnnnnnnnnnnnnnnnnnnnnnnnnnnnnnnnnnnnnnnnnnnnnnnnnnnnnnnnnnnnnnnnnnnnnnnnnnnnnnnnnnnnnnnnnnnnnnnnnnnnnnnnnnnnnnnnnnnnnnnnnnnnnnnnnnnnnnnnnnnnnnnnnnnnnnnnnnnnnnnnnnnnnnnnnnnnnnnnnnnnnnnnnnnnnnnnnnnnnnnnnnnnnnnnnnnnnnnnnnnnnnnnnnnnnnnnnnnnnnnnnnnnnnnnnnnnnnnnnnnnnnnnnnnnnnnnnnnnnnnnnnnnnnnnnnnnnnnnnnnnnnnnnnnnnnnnnnnnnnnnnnnnnnnnnnnnnnnnnnnnnnnnnnnnnnnnnnnnnnnnnnnnnnnnnnnnnnnnnnnnnnnnnnnnnnnnnnnnnnnnnnnnnnnnnnnnnnnnnnnnnnnnnnnnnnnnnnnnnnnnnnnnnnnnnnnnnnnnnnnnnnnnnnnnnnnnnnnnnnnnnnnnnnnnnnnnnnnnnnnnnnnnnnnnnnnnnnnnnnnnnnnnnnnnnnnnnnnnnnnnnnnnnnnnnnnnnnnnnnnnnnnnnnnnnnnnnnnnnnnnnnnnnnnnnnnnnnnnnnnnnnnnnnnnnnnnnnnnnnnnnnnnnnnnnnnnnnnnnnnnnnnnnnnnnnnnnnnnnnnnnnnnnnnnnnnnnnnnnnnnnnnnnnnnnnnnnnnnnnnnnnnnnnnnnnnnnnnnnnnnnnnnnnnnnnnnnnnnnnnnnnnnnnnnnnnnnnnnnnnnnnnnnnnnnnnnnnnnnnnnnnnnnnnnnnnnnnnnnnnnnnnnnnnnnnnnnnnnnnnnnnnnnnnnnnnnnnnnnnnnnnnnnnnnnnnnnnnnnnnnnnnnnnnnnnnnnnnnnnnnnnnnnnnnnnnnnnnnnnnnnnnnnnnnnnnnnnnnnnnnnnnnnnnnnnnnnnnnnnnnnnnnnnnnnnnnnnnnnnnnnnnnnnnnnnnnnnnnnnnnnnnnnnnnnnnnnnnnnnnnnnnnnnnnnnnnnnnnnnnnnnnnnnnnnnnnnnnnnnnnnnnnnnnnnnnnnnnnnnnnnnnnnnnnnnnnnnnnnnnnnnnnnnnnnnnnnnnnnnnnnnnnnnnnnnnnnnnnnnnnnnnnnnnnnnnnnnnnnnnnnnnnnnnnnnnnnnnnnnnnnnnnnnnnnnnnnnnnnnnnnnnnnnnnnnnnnnnnnnnnnnnnnnnnnnnnnnnnnnnnnnnnnnnnnnnnnnnnnnnnnnnnnnnnnnnnnnnnnnnnnnnnnnnnnnnnnnnnnnnnnnnnnnnnnnnnnnnnnnnnnnnnnnnnnnnnnnnnnnnnnnnnnnnnnnnnnnnnnnnnnnnnnnnnnnnnnnnnnnnnnnnnnnnnnnnnnnnnnnnnnnnnnnnnnnnnnnnnnnnnnnnnnnnnnnnnnnnnnnnnnnnnnnnnnnnnnnnnnnnnnnnnnnnnnnnnnnnnnnnnnnnnnnnnnnnnnnnnnnnnnnnnnnnnnnnnnnnnnnnnnnnnnnnnnnnnnnnnnnnnnnnnnnnnnnnnnnnnnnnnnnnnnnnnnnnnnnnnnnnnnnnnnnnnnnnnnnnnnnnnnnnnnnnnnnnnnnnnnnnnnnnnnnnnnnnnnnnnnnnnnnnnnnnnnnnnnnnnnnnnnnnnnnnnnnnnnnnnnnnnnnnnnnnnnnnnnnnnnnnnnnnnnnnnnnnnnnnnnnnnnnnnnnnnnnnnnnnnnnnnnnnnnnnnnnnnnnnnnnnnnnnnnnnnnnnnnnnnnnnnnnnnnnnnnnnnnnnnnnnnnnnnnnnnnnnnnnnnnnnnnnnnnnnnnnnnnnnnnnnnnnnnnnnnnnnnnnnnnnnnnnnnnnnnnnnnnnnnnnnnnnnnnnnnnnnnnnnnnnnnnnnnnnnnnnnnnnnnnnnnnnnnnnnnnnnnnnnnnnnnnnnnnnnnnnnnnnnnnnnnnnnnnnnnnnnnnnnnnnnnnnnnnnnnnnnnnnnnnnnnnnnnnnnnnnnnnnnnnnnnnnnnnnnnnnnnnnnnnnnnnnnnnnnnnnnnnnnnnnnnnnnnnnnnnnnnnnnnnnnnnnnnnnnnnnnnnnnnnnnnnnnnnnnnnnnnnnnnnnnnnnnnnnnnnnnnnnnnnnnnnnnnnnnnnnnnnnnnnnnnnnnnnnnnnnnnnnnnnnnnnnnnnnnnnnnnnnnnnnnnnnnnnnnnnnnnnnnnnnnnnnnnnnnnnnnnnnnnnnnnnnnnnnnnnnnnnnnnnnnnnnnnnnnnnnnnnnnnnnnnnnnnnnnnnnnnnnnnnnnnnnnnnnnnnnnnnnnnnnnnnnnnnnnnnnnnnnnnnnnnnnnnnnnnnnnnnnnnnnnnnnnnnnnnnnnnnnnnnnnnnnnnnnnnnnnnnnnnnnnnnnnnnnnnnnnnnnnnnnnnnnnnnnnnnnnnnnnnnnnnnnnnnnnnnnnnnnnnnnnnnnnnnnnnnnnnnnnnnnnnnnnnnnnnnnnnnnnnnnnnnnnnnnnnnnnnnnnnnnnnnnnnnnnnnnnnnnnnnnnnnnnnnnnnnnnnnnnnnnnnnnnnnnnnnnnnnnnnnnnnnnnnnnnnnnnnnnnnnnnnnnnnnnnnnnnnnnnnnnnnnnnnnnnnnnnnnnnnnnnnnnnnnnnnnnnnnnnnnnnnnnnnnnnnnnnnnnnnnnnnnnnnnnnnnnnnnnnnnnnnnnnnnnnnnnnnnnnnnnnnnnnnnnnnnnnnnnnnnnnnnnnnnnnnnnnnnnnnnnnnnnnnnnnnnnnnnnnnnnnnnnnnnnnnnnnnnnnnnnnnnnnnnnnnnnnnnnnnnnnnnnnnnnnnnnnnnnnnnnnnnnnnnnnnnnnnnnnnnnnnnnnnnnnnnnnnnnnnnnnnnnnnnnnnnnnnnnnnnnnnnnnnnnnnnnnnnnnnnnnnnnnnnnnnnnnnnnnnnnnnnnnnnnnnnnnnnnnnnnnnnnnnnnnnnnnnnnnnnnnnnnnnnnnnnnnnnnnnnnnnnnnnnnnnnnnnnnnnnnnnnnnnnnnnnnnnnnnnnnnnnnnnnnnnnnnnnnnnnnnnnnnnnnnnnnnnnnnnnnnnnnnnnnnnnnnnnnnnnnnnnnnnnnnnnnnnnnnnnnnnnnnnnnnnnnnnnnnnnnnnnnnnnnnnnnnnnnnnnnnnnnnnnnnnnnnnnnnnnnnnnnnnnnnnnnnnnnnnnnnnnnnnnnnnnnnnnnnnnnnnnnnnnnnnnnnnnnnnnnnnnnnnnnnnnnnnnnnnnnnnnnnnnnnnnnnnnnnnnnnnnnnnnnnnnnnnnnnnnnnnnnnnnnnnnnnnnnnnnnnnnnnnnnnnnnnnnnnnnnnnnnnnnnnnnnnnnnnnnnnnnnnnnnnnnnnnnnnnnnnnnnnnnnnnnnnnnnnnnnnnnnnnnnnnnnnnnnnnnnnnnnnnnnnnnnnnnnnnnnnnnnnnnnnnnnnnnnnnnnnnnnnnnnnnnnnnnnnnnnnnnnnnnnnnnnnnnnnnnnnnnnnnnnnnnnnnnnnnnnnnnnnnnnnnnnnnnnnnnnnnnnnnnnnnnnnnnnnnnnnnnnnnnnnnnnnnnnnnnnnnnnnnnnnnnnnnnnnnnnnnnnnnnnnnnnnnnnnnnnnnnnnnnnnnnnnnnnnnnnnnnnnnnnnnnnnnnnnnnnnnnnnnnnnnnnnnnnnnnnnnnnnnnnnnnnnnnnnnnnnnnnnnnnnnnnnnnnnnnnnnnnnnnnnnnnnnnnnnnnnnnnnnnnnnnnnnnnnnnnnnnnnnnnnnnnnnnnnnnnnnnnnnnnnnnnnnnnnnnnnnnnnnnnnnnnnnnnnnnnnnnnnnnnnnnnnnnnnnnnnnnnnnnnnnnnnnnnnnnnnnnnnnnnnnnnnnnnnnnnnnnnnnnnnnnnnnnnnnnnnnnnnnnnnnnnnnnnnnnnnnnnnnnnnnnnnnnnnnnnnnnnnnnnnnnnnnnnnnnnnnnnnnnnnnnnnnnnnnnnnnnnnnnnnnnnnnnnnnnnnnnnnnnnnnnnnnnnnnnnnnnnnnnnnnnnnnnnnnnnnnnnnnnnnnnnnnnnnnnnnnnnnnnnnnnnnnnnnnnnnnnnnnnnnnnnnnnnnnnnnnnnnnnnnnnnnnnnnnnnnnnnnnnnnnnnnnnnnnnnnnnnnnnnnnnnnnnnnnnnnnnnnnnnnnnnnnnnnnnnnnnnnnnnnnnnnnnnnnnnnnnnnnnnnnnnnnnnnnnnnnnnnnnnnnnnnnnnnnnnnnnnnnnnnnnnnnnnnnnnnnnnnnnnnnnnnnnnnnnnnnnnnnnnnnnnnnnnnnnnnnnnnnnnnnnnnnnnnnnnnnnnnnnnnnnnnnnnnnnnnnnnnnnnnnnnnnnnnnnnnnnnnnnnnnnnnnnnnnnnnnnnnnnnnnnnnnnnnnnnnnnnnnnnnnnnnnnnnnnnnnnnnnnnnnnnnnnnnnnnnnnnnnnnnnnnnnnnnnnnnnnnnnnnnnnnnnnnnnnnnnnnnnnnnnnnnnnnnnnnnnnnnnnnnnnnnnnnnnnnnnnnnnnnnnnnnnnnnnnnnnnnnnnnnnnnnnnnnnnnnnnnnnnnnnnnnnnnnnnnnnnnnnnnnnnnnnnnnnnnnnnnnnnnnnnnnnnnnnnnnnnnnnnnnnnnnnnnnnnnnnnnnnnnnnnnnnnnnnnnnnnnnnnnnnnnnnnnnnnnnnnnnnnnnnnnnnnnnnnnnnnnnnnnnnnnnnnnnnnnnnnnnnnnnnnnnnnnnnnnnnnnnnnnnnnnnnnnnnnnnnnnnnnnnnnnnnnnnnnnnnnnnnnnnnnnnnnnnnnnnnnnnnnnnnnnnnnnnnnnnnnnnnnnnnnnnnnnnnnnnnnnnnnnnnnnnnnnnnnnnnnnnnnnnnnnnnnnnnnnnnnnnnnnnnnnnnnnnnnnnnnnnnnnnnnnnnnnnnnnnnnnnnnnnnnnnnnnnnnnnnnnnnnnnnnnnnnnnnnnnnnnnnnnnnnnnnnnnnnnnnnnnnnnnnnnnnnnnnnnnnnnnnnnnnnnnnnnnnnnnnnnnnnnnnnnnnnnnnnnnnnnnnnnnnnnnnnnnnnnnnnnnnnnnnnnnnnnnnnnnnnnnnnnnnnnnnnnnnnnnnnnnnnnnnnnnnnnnnnnnnnnnnnnnnnnnnnnnnnnnnnnnnnnnnnnnnnnnnnnnnnnnnnnnnnnnnnnnnnnnnnnnnnnnnnnnnnnnnnnnnnnnnnnnnnnnnnnnnnnnnnnnnnnnnnnnnnnnnnnnnnnnnnnnnnnnnnnnnnnnnnnnnnnnnnnnnnnnnnnnnnnnnnnnnnnnnnnnnnnnnnnnnnnnnnnnnnnnnnnnnnnnnnnnnnnnnnnnnnnnnnnnnnnnnnnnnnnnnnnnnnnnnnnnnnnnnnnnnnnnnnnnnnnnnnnnnnnnnnnnnnnnnnnnnnnnnnnnnnnnnnnnnnnnnnnnnnnnnnnnnnnnnnnnnnnnnnnnnnnnnnnnnnnnnnnnnnnnnnnnnnnnnnnnnnnnnnnnnnnnnnnnnnnnnnnnnnnnnnnnnnnnnnnnnnnnnnnnnnnnnnnnnnnnnnnnnnnnnnnnnnnnnnnnnnnnnnnnnnnnnnnnnnnnnnnnnnnnnnnnnnnnnnnnnnnnnnnnnnnnnnnnnnnnnnnnnnnnnnnnnnnnnnnnnnnnnnnnnnnnnnnnnnnnnnnnnnnnnnnnnnnnnnnnnnnnnnnnnnnnnnnnnnnnnnnnnnnnnnnnnnnnnnnnnnnnnnnnnnnnnnnnnnnnnnnnnnnnnnnnnnnnnnnnnnnnnnnnnnnnnnnnnnnnnnnnnnnnnnnnnnnnnnnnnnnnnnnnnnnnnnnnnnnnnnnnnnnnnnnnnnnnnnnnnnnnnnnnnnnnnnnnnnnnnnnnnnnnnnnnnnnnnnnnnnnnnnnnnnnnnnnnnnnnnnnnnnnnnnnnnnnnnnnnnnnnnnnnnnnnnnnnnnnnnnnnnnnnnnnnnnnnnnnnnnnnnnnnnnnnnnnnnnnnnnnnnnnnnnnnnnnnnnnnnnnnnnnnnnnnnnnnnnnnnnnnnnnnnnnnnnnnnnnnnnnnnnnnnnnnnnnnnnnnnnnnnnnnnnnnnnnnnnnnnnnnnnnnnnnnnnnnnnnnnnnnnnnnnnnnnnnnnnnnnnnnnnnnnnnnnnnnnnnnnnnnnnnnnnnnnnnnnnnnnnnnnnnnnnnnnnnnnnnnnnnnnnnnnnnnnnnnnnnnnnnnnnnnnnnnnnnnnnnnnnnnnnnnnnnnnnnnnnnnnnnnnnnnnnnnnnnnnnnnnnnnnnnnnnnnnnnnnnnnnnnnnnnnnnnnnnnnnnnnnnnnnnnnnnnnnnnnnnnnnnnnnnnnnnnnnnnnnnnnnnnnnnnnnnnnnnnnnnnnnnnnnnnnnnnnnnnnnnnnnnnnnnnnnnnnnnnnnnnnnnnnnnnnnnnnnnnnnnnnnnnnnnnnnnnnnnnnnnnnnnnnnnnnnnnnnnnnnnnnnnnnnnnnnnnnnnnnnnnnnnnnnnnnnnnnnnnnnnnnnnnnnnnnnnnnnnnnnnnnnnnnnnnnnnnnnnnnnnnnnnnnnnnnnnnnnnnnnnnnnnnnnnnnnnnnnnnnnnnnnnnnnnnnnnnnnnnnnnnnnnnnnnnnnnnnnnnnnnnnnnnnnnnnnnnnnnnnnnnnnnnnnnnnnnnnnnnnnnnnnnnnnnnnnnnnnnnnnnnnnnnnnnnnnnnnnnnnnnnnnnnnnnnnnnnnnnnnnnnnnnnnnnnnnnnnnnnnnnnnnnnnnnnnnnnnnnnnnnnnnnnnnnnnnnnnnnnnnnnnnnnnnnnnnnnnnnnnnnnnnnnnnnnnnnnnnnnnnnnnnnnnnnnnnnnnnnnnnnnnnnnnnnnnnnnnnnnnnnnnnnnnnnnnnnnnnnnnnnnnnnnnnnnnnnnnnnnnnnnnnnnnnnnnnnnnnnnnnnnnnnnnnnnnnnnnnnnnnnnnnnnnnnnnnnnnnnnnnnnnnnnnnnnnnnnnnnnnnnnnnnnnnnnnnnnnnnnnnnnnnnnnnnnnnnnnnnnnnnnnnnnnnnnnnnnnnnnnnnnnnnnnnnnnnnnnnnnnnnnnnnnnnnnnnnnnnnnnnnnnnnnnnnnnnnnnnnnnnnnnnnnnnnnnnnnnnnnnnnnnnnnnnnnnnnnnnnnnnnnnnnnnnnnnnnnnnnnnnnnnnnnnnnnnnnnnnnnnnnnnnnnnnnnnnnnnnnnnnnnnnnnnnnnnnnnnnnnnnnnnnnnnnnnnnnnnnnnnnnnnnnnnnnnnnnnnnnnnnnnnnnnnnnnnnnnnnnnnnnnnnnnnnnnnnnnnnnnnnnnnnnnnnnnnnnnnnnnnnnnnnnnnnnnnnnnnnnnnnnnnnnnnnnnnnnnnnnnnnnnnnnnnnnnnnnnnnnnnnnnnnnnnnnnnnnnnnnnnnnnnnnnnnnnnnnnnnnnnnnnnnnnnnnnnnnnnnnnnnnnnnnnnnnnnnnnnnnnnnnnnnnnnnnnnnnnnnnnnnnnnnnnnnnnnnnnnnnnnnnnnnnnnnnnnnnnnnnnnnnnnnnnnnnnnnnnnnnnnnnnnnnnnnnnnnnnnnnnnnnnnnnnnnnnnnnnnnnnnnnnnnnnnnnnnnnnnnnnnnnnnnnnnnnnnnnnnnnnnnnnnnnnnnnnnnnnnnnnnnnnnnnnnnnnnnnnnnnnnnnnnnnnnnnnnnnnnnnnnnnnnnnnnnnnnnnnnnnnnnnnnnnnnnnnnnnnnnnnnnnnnnnnnnnnnnnnnnnnnnnnnnnnnnnnnnnnnnnnnnnnnnnnnnnnnnnnnnnnnnnnnnnnnnnnnnnnnnnnnnnnnnnnnnnnnnnnnnnnnnnnnnnnnnnnnnnnnnnnnnnnnnnnnnnnnnnnnnnnnnnnnnnnnnnnnnnnnnnnnnnnnnnnnnnnnnnnnnnnnnnnnnnnnnnnnnnnnnnnnnnnnnnnnnnnnnnnnnnnnnnnnnnnnnnnnnnnnnnnnnnnnnnnnnnnnnnnnnnnnnnnnnnnnnnnnnnnnnnnnnnnnnnnnnnnnnnnnnnnnnnnnnnnnnnnnnnnnnnnnnnnnnnnnnnnnnnnnnnnnnnnnnnnnnnnnnnnnnnnnnnnnnnnnnnnnnnnnnnnnnnnnnnnnnnnnnnnnnnnnnnnnnnnnnnnnnnnnnnnnnnnnnnnnnnnnnnnnnnnnnnnnnnnnnnnnnnnnnnnnnnnnnnnnnnnnnnnnnnnnnnnnnnnnnnnnnnnnnnnnnnnnnnnnnnnnnnnnnnnnnnnnnnnnnnnnnnnnnnnnnnnnnnnnnnnnnnnnnnnnnnnnnnnnnnnnnnnnnnnnnnnnnnnnnnnnnnnnnnnnnnnnnnnnnnnnnnnnnnnnnnnnnnnnnnnnnnnnnnnnnnnnnnnnnnnnnnnnnnnnnnnnnnnnnnnnnnnnnnnnnnnnnnnnnnnnnnnnnnnnnnnnnnnnnnnnnnnnnnnnnnnnnnnnnnnnnnnnnnnnnnnnnnnnnnnnnnnnnnnnnnnnnnnnnnnnnnnnnnnnnnnnnnnnnnnnnnnnnnnnnnnnnnnnnnnnnnnnnnnnnnnnnnnnnnnnnnnnnnnnnnnnnnnnnnnnnnnnnnnnnnnnnnnnnnnnnnnnnnnnnnnnnnnnnnnnnnnnnnnnnnnnnnnnnnnnnnnnnnnnnnnnnnnnnnnnnnnnnnnnnnnnnnnnnnnnnnnnnnnnnnnnnnnnnnnnnnnnnnnnnnnnnnnnnnnnnnnnnnnnnnnnnnnnnnnnnnnnnnnnnnnnnnnnnnnnnnnnnnnnnnnnnnnnnnnnnnnnnnnnnnnnnnnnnnnnnnnnnnnnnnnnnnnnnnnnnnnnnnnnnnnnnnnnnnnnnnnnnnnnnnnnnnnnnnnnnnnnnnnnnnnnnnnnnnnnnnnnnnnnnnnnnnnnnnnnnnnnnnnnnnnnnnnnnnnnnnnnnnnnnnnnnnnnnnnnnnnnnnnnnnnnnnnnnnnnnnnnnnnnnnnnnnnnnnnnnnnnnnnnnnnnnnnnnnnnnnnnnnnnnnnnnnnnnnnnnnnnnnnnnnnnnnnnnnnnnnnnnnnnnnnnnnnnnnnnnnnnnnnnnnnnnnnnnnnnnnnnnnnnnnnnnnnnnnnnnnnnnnnnnnnnnnnnnnnnnnnnnnnnnnnnnnnnnnnnnnnnnnnnnnnnnnnnnnnnnnnnnnnnnnnnnnnnnnnnnnnnnnnnnnnnnnnnnnnnnnnnnnnnnnnnnnnnnnnnnnnnnnnnnnnnnnnnnnnnnnnnnnnnnnnnnnnnnnnnnnnnnnnnnnnnnnnnnnnnnnnnnnnnnnnnnnnnnnnnnnnnnnnnnnnnnnnnnnnnnnnnnnnnnnnnnnnnnnnnnnnnnnnnnnnnnnnnnnnnnnnnnnnnnnnnnnnnnnnnnnnnnnnnnnnnnnnnnnnnnnnnnnnnnnnnnnnnnnnnnnnnnnnnnnnnnnnnnnnnnnnnnnnnnnnnnnnnnnnnnnnnnnnnnnnnnnnnnnnnnnnnnnnnnnnnnnnnnnnnnnnnnnnnnnnnnnnnnnnnnnnnnnnnnnnnnnnnnnnnnnnnnnnnnnnnnnnnnnnnnnnnnnnnnnnnnnnnnnnnnnnnnnnnnnnnnnnnnnnnnnnnnnnnnnnnnnnnnnnnnnnnnnnnnnnnnnnnnnnnnnnnnnnnnnnnnnnnnnnnnnnnnnnnnnnnnnnnnnnnnnnnnnnnnnnnnnnnnnnnnnnnnnnnnnnnnnnnnnnnnnnnnnnnnnnnnnnnnnnnnnnnnnnnnnnnnnnnnnnnnnnnnnnnnnnnnnnnnnnnnnnnnnnnnnnnnnnnnnnnnnnnnnnnnnnnnnnnnnnnnnnnnnnnnnnnnnnnnnnnnnnnnnnnnnnnnnnnnnnnnnnnnnnnnnnnnnnnnnnnnnnnnnnnnnnnnnnnnnnnnnnnnnnnnnnnnnnnnnnnnnnnnnnnnnnnnnnnnnnnnnnnnnnnnnnnnnnnnnnnnnnnnnnnnnnnnnnnnnnnnnnnnnnnnnnnnnnnnnnnnnnnnnnnnnnnnnnnnnnnnnnnnnnnnnnnnnnnnnnnnnnnnnnnnnnnnnnnnnnnnnnnnnnnnnnnnnnnnnnnnnnnnnnnnnnnnnnnnnnnnnnnnnnnnnnnnnnnnnnnnnnnnnnnnnnnnnnnnnnnnnnnnnnnnnnnnnnnnnnnnnnnnnnnnnnnnnnnnnnnnnnnnnnnnnnnnnnnnnnnnnnnnnnnnnnnnnnnnnnnnnnnnnnnnnnnnnnnnnnnnnnnnnnnnnnnnnnnnnnnnnnnnnnnnnnnnnnnnnnnnnnnnnnnnnnnnnnnnnnnnnnnnnnnnnnnnnnnnnnnnnnnnnnnnnnnnnnnnnnnnnnnnnnnnnnnnnnnnnnnnnnnnnnnnnnnnnnnnnnnnnnnnnnnnnnnnnnnnnnnnnnnnnnnnnnnnnnnnnnnnnnnnnnnnnnnnnnnnnnnnnnnnnnnnnnnnnnnnnnnnnnnnnnnnnnnnnnnnnnnnnnnnnnnnnnnnnnnnnnnnnnnnnnnnnnnnnnnnnnnnnnnnnnnnnnnnnnnnnnnnnnnnnnnnnnnnnnnnnnnnnnnnnnnnnnnnnnnnnnnnnnnnnnnnnnnnnnnnnnnnnnnnnnnnnnnnnnnnnnnnnnnnnnnnnnnnnnnnnnnnnnnnnnnnnnnnnnnnnnnnnnnnnnnnnnnnnnnnnnnnnnnnnnnnnnnnnnnnnnnnnnnnnnnnnnnnnnnnnnnnnnnnnnnnnnnnnnnnnnnnnnnnnnnnnnnnnnnnnnnnnnnnnnnnnnnnnnnnnnnnnnnnnnnnnnnnnnnnnnnnnnnnnnnnnnnnnnnnnnnnnnnnnnnnnnnnnnnnnnnnnnnnnnnnnnnnnnnnnnnnnnnnnnnnnnnnnnnnnnnnnnnnnnnnnnnnnnnnnnnnnnnnnnnnnnnnnnnnnnnnnnnnnnnnnnnnnnnnnnnnnnnnnnnnnnnnnnnnnnnnnnnnnnnnnnnnnnnnnnnnnnnnnnnnnnnnnnnnnnnnnnnnnnnnnnnnnnnnnnnnnnnnnnnnnnnnnnnnnnnnnnnnnnnnnnnnnnnnnnnnnnnnnnnnnnnnnnnnnnnnnnnnnnnnnnnnnnnnnnnnnnnnnnnnnnnnnnnnnnnnnnnnnnnnnnnnnnnnnnnnnnnnnnnnnnnnnnnnnnnnnnnnnnnnnnnnnnnnnnnnnnnnnnnnnnnnnnnnnnnnnnnnnnnnnnnnnnnnnnnnnnnnnnnnnnnnnnnnnnnnnnnnnnnnnnnnnnnnnnnnnnnnnnnnnnnnnnnnnnnnnnnnnnnnnnnnnnnnnnnnnnnnnnnnnnnnnnnnnnnnnnnnnnnnnnnnnnnnnnnnnnnnnnnnnnnnnnnnnnnnnnnnnnnnnnnnnnnnnnnnnnnnnnnnnnnnnnnnnnnnnnnnnnnnnnnnnnnnnnnnnnnnnnnnnnnnnnnnnnnnnnnnnnnnnnnnnnnnnnnnnnnnnnnnnnnnnnnnnnnnnnnnnnnnnnnnnnnnnnnnnnnnnnnnnnnnnnnnnnnnnnnnnnnnnnnnnnnnnnnnnnnnnnnnnnnnnnnnnnnnnnnnnnnnnnnnnnnnnnnnnnnnnnnnnnnnnnnnnnnnnnnnnnnnnnnnnnnnnnnnnnnnnnnnnnnnnnnnnnnnnnnnnnnnnnnnnnnnnnnnnnnnnnnnnnnnnnnnnnnnnnnnnnnnnnnnnnnnnnnnnnnnnnnnnnnnnnnnnnnnnnnnnnnnnnnnnnnnnnnnnnnnnnnnnnnnnnnnnnnnnnnnnnnnnnnnnnnnnnnnnnnnnnnnnnnnnnnnnnnnnnnnnnnnnnnnnnnnnnnnnnnnnnnnnnnnnnnnnnnnnnnnnnnnnnnnnnnnnnnnnnnnnnnnnnnnnnnnnnnnnnnnnnnnnnnnnnnnnnnnnnnnnnnnnnnnnnnnnnnnnnnnnnnnnnnnnnnnnnnnnnnnnnnnnnnnnnnnnnnnnnnnnnnnnnnnnnnnnnnnnnnnnnnnnnnnnnnnnnnnnnnnnnnnnnnnnnnnnnnnnnnnnnnnnnnnnnnnnnnnnnnnnnnnnnnnnnnnnnnnnnnnnnnnnnnnnnnnnnnnnnnnnnnnnnnnnnnnnnnnnnnnnnnnnnnnnnnnnnnnnnnnnnnnnnnnnnnnnnnnnnnnnnnnnnnnnnnnnnnnnnnnnnnnnnnnnnnnnnnnnnnnnnnnnnnnnnnnnnnnnnnnnnnnnnnnnnnnnnnnnnnnnnnnnnnnnnnnnnnnnnnnnnnnnnnnnnnnnnnnnnnnnnnnnnnnnnnnnnnnnnnnnnnnnnnnnnnnnnnnnnnnnnnnnnnnnnnnnnnnnnnnnnnnnnnnnnnnnnnnnnnnnnnnnnnnnnnnnnnnnnnnnnnnnnnnnnnnnnnnnnnnnnnnnnnnnnnnnnnnnnnnnnnnnnnnnnnnnnnnnnnnnnnnnnnnnnnnnnnnnnnnnnnnnnnnnnnnnnnnnnnnnnnnnnnnnnnnnnnnnnnnnnnnnnnnnnnnnnnnnnnnnnnnnnnnnnnnnnnnnnnnnnnnnnnnnnnnnnnnnnnnnnnnnnnnnnnnnnnnnnnnnnnnnnnnnnnnnnnnnnnnnnnnnnnnnnnnnnnnnnnnnnnnnnnnnnnnnnnnnnnnnnnnnnnnnnnnnnnnnnnnnnnnnnnnnnnnnnnnnnnnnnnnnnnnnnnnnnnnnnnnnnnnnnnnnnnnnnnnnnnnnnnnnnnnnnnnnnnnnnnnnnnnnnnnnnnnnnnnnnnnnnnnnnnnnnnnnnnnnnnnnnnnnnnnnnnnnnnnnnnnnnnnnnnnnnnnnnnnnnnnnnnnnnnnnnnnnnnnnnnnnnnnnnnnnnnnnnnnnnnnnnnnnnnnnnnnnnnnnnnnnnnnnnnnnnnnnnnnnnnnnnnnnnnnnnnnnnnnnnnnnnnnnnnnnnnnnnnnnnnnnnnnnnnnnnnnnnnnnnnnnnnnnnnnnnnnnnnnnnnnnnnnnnnnnnnnnnnnnnnnnnnnnnnnnnnnnnnnnnnnnnnnnnnnnnnnnnnnnnnnnnnnnnnnnnnnnnnnnnnnnnnnnnnnnnnnnnnnnnnnnnnnnnnnnnnnnnnnnnnnnnnnnnnnnnnnnnnnnnnnnnnnnnnnnnnnnnnnnnnnnnnnnnnnnnnnnnnnnnnnnnnnnnnnnnnnnnnnnnnnnnnnnnnnnnnnnnnnnnnnnnnnnnnnnnnnnnnnnnnnnnnnnnnnnnnnnnnnnnnnnnnnnnnnnnnnnnnnnnnnnnnnnnnnnnnnnnnnnnnnnnnnnnnnnnnnnnnnnnnnnnnnnnnnnnnnnnnnnnnnnnnnnnnnnnnnnnnnnnnnnnnnnnnnnnnnnnnnnnnnnnnnnnnnnnnnnnnnnnnnnnnnnnnnnnnnnnnnnnnnnnnnnnnnnnnnnnnnnnnnnnnnnnnnnnnnnnnnnnnnnnnnnnnnnnnnnnnnnnnnnnnnnnnnnnnnnnnnnnnnnnnnnnnnnnnnnnnnnnnnnnnnnnnnnnnnnnnnnnnnnnnnnnnnnnnnnnnnnnnnnnnnnnnnnnnnnnnnnnnnnnnnnnnnnnnnnnnnnnnnnnnnnnnnnnnnnnnnnnnnnnnnnnnnnnnnnnnnnnnnnnnnnnnnnnnnnnnnnnnnnnnnnnnnnnnnnnnnnnnnnnnnnnnnnnnnnnnnnnnnnnnnnnnnnnnnnnnnnnnnnnnnnnnnnnnnnnnnnnnnnnnnnnnnnnnnnnnnnnnnnnnnnnnnnnnnnnnnnnnnnnnnnnnnnnnnnnnnnnnnnnnnnnnnnnnnnnnnnnnnnnnnnnnnnnnnnnnnnnnnnnnnnnnnnnnnnnnnnnnnnnnnnnnnnnnnnnnnnnnnnnnnnnnnnnnnnnnnnnnnnnnnnnnnnnnnnnnnnnnnnnnnnnnnnnnnnnnnnnnnnnnnnnnnnnnnnnnnnnnnnnnnnnnnnnnnnnnnnnnnnnnnnnnnnnnnnnnnnnnnnnnnnnnnnnnnnnnnnnnnnnnnnnnnnnnnnnnnnnnnnnnnnnnnnnnnnnnnnnnnnnnnnnnnnnnnnnnnnnnnnnnnnnnnnnnnnnnnnnnnnnnnnnnnnnnnnnnnnnnnnnnnnnnnnnnnnnnnnnnnnnnnnnnnnnnnnnnnnnnnnnnnnnnnnnnnnnnnnnnnnnnnnnnnnnnnnnnnnnnnnnnnnnnnnnnnnnnnnnnnnnnnnnnnnnnnnnnnnnnnnnnnnnnnnnnnnnnnnnnnnnnnnnnnnnnnnnnnnnnnnnnnnnnnnnnnnnnnnnnnnnnnnnnnnnnnnnnnnnnnnnnnnnnnnnnnnnnnnnnnnnnnnnnnnnnnnnnnnnnnnnnnnnnnnnnnnnnnnnnnnnnnnnnnnnnnnnnnnnnnnnnnnnnnnnnnnnnnnnnnnnnnnnnnnnnnnnnnnnnnnnnnnnnnnnnnnnnnnnnnnnnnnnnnnnnnnnnnnnnnnnnnnnnnnnnnnnnnnnnnnnnnnnnnnnnnnnnnnnnnnnnnnnnnnnnnnnnnnnnnnnnnnnnnnnnnnnnnnnnnnnnnnnnnnnnnnnnnnnnnnnnnnnnnnnnnnnnnnnnnnnnnnnnnnnnnnnnnnnnnnnnnnnnnnnnnnnnnnnnnnnnnnnnnnnnnnnnnnnnnnnnnnnnnnnnnnnnnnnnnnnnnnnnnnnnnnnnnnnnnnnnnnnnnnnnnnnnnnnnnnnnnnnnnnnnnnnnnnnnnnnnnnnnnnnnnnnnnnnnnnnnnnnnnnnnnnnnnnnnnnnnnnnnnnnnnnnnnnnnnnnnnnnnnnnnnnnnnnnnnnnnnnnnnnnnnnnnnnnnnnnnnnnnnnnnnnnnnnnnnnnnnnnnnnnnnnnnnnnnnnnnnnnnnnnnnnnnnnnnnnnnnnnnnnnnnnnnnnnnnnnnnnnnnnnnnnnnnnnnnnnnnnnnnnnnnnnnnnnnnnnnnnnnnnnnnnnnnnnnnnnnnnnnnnnnnnnnnnnnnnnnnnnnnnnnnnnnnnnnnnnnnnnnnnnnnnnnnnnnnnnnnnnnnnnnnnnnnnnnnnnnnnnnnnnnnnnnnnnnnnnnnnnnnnnnnnnnnnnnnnnnnnnnnnnnnnnnnnnnnnnnnnnnnnnnnnnnnnnnnnnnnnnnnnnnnnnnnnnnnnnnnnnnnnnnnnnnnnnnnnnnnnnnnnnnnnnnnnnnnnnnnnnnnnnnnnnnnnnnnnnnnnnnnnnnnnnnnnnnnnnnnnnnnnnnnnnnnnnnnnnnnnnnnnnnnnnnnnnnnnnnnnnnnnnnnnnnnnnnnnnnnnnnnnnnnnnnnnnnnnnnnnnnnnnnnnnnnnnnnnnnnnnnnnnnnnnnnnnnnnnnnnnnnnnnnnnnnnnnnnnnnnnnnnnnnnnnnnnnnnnnnnnnnnnnnnnnnnnnnnnnnnnnnnnnnnnnnnnnnnnnnnnnnnnnnnnnnnnnnnnnnnnnnnnnnnnnnnnnnnnnnnnnnnnnnnnnnnnnnnnnnnnnnnnnnnnnnnnnnnnnnnnnnnnnnnnnnnnnnnnnnnnnnnnnnnnnnnnnnnnnnnnnnnnnnnnnnnnnnnnnnnnnnnnnnnnnnnnnnnnnnnnnnnnnnnnnnnnnnnnnnnnnnnnnnnnnnnnnnnnnnnnnnnnnnnnnnnnnnnnnnnnnnnnnnnnnnnnnnnnnnnnnnnnnnnnnnnnnnnnnnnnnnnnnnnnnnnnnnnnnnnnnnnnnnnnnnnnnnnnnnnnnnnnnnnnnnnnnnnnnnnnnnnnnnnnnnnnnnnnnnnnnnnnnnnnnnnnnnnnnnnnnnnnnnnnnnnnnnnnnnnnnnnnnnnnnnnnnnnnnnnnnnnnnnnnnnnnnnnnnnnnnnnnnnnnnnnnnnnnnnnnnnnnnnnnnnnnnnnnnnnnnnnnnnnnnnnnnnnnnnnnnnnnnnnnnnnnnnnnnnnnnnnnnnnnnnnnnnnnnnnnnnnnnnnnnnnnnnnnnnnnnnnnnnnnnnnnnnnnnnnnnnnnnnnnnnnnnnnnnnnnnnnnnnnnnnnnnnnnnnnnnnnnnnnnnnnnnnnnnnnnnnnnnnnnnnnnnnnnnnnnnnnnnnnnnnnnnnnnnnnnnnnnnnnnnnnnnnnnnnnnnnnnnnnnnnnnnnnnnnnnnnnnnnnnnnnnnnnnnnnnnnnnnnnnnnnnnnnnnnnnnnnnnnnnnnnnnnnnnnnnnnnnnnnnnnnnnnnnnnnnnnnnnnnnnnnnnnnnnnnnnnnnnnnnnnnnnnnnnnnnnnnnnnnnnnnnnnnnnnnnnnnnnnnnnnnnnnnnnnnnnnnnnnnnnnnnnnnnnnnnnnnnnnnnnnnnnnnnnnnnnnnnnnnnnnnnnnnnnnnnnnnnnnnnnnnnnnnnnnnnnnnnnnnnnnnnnnnnnnnnnnnnnnnnnnnnnnnnnnnnnnnnnnnnnnnnnnnnnnnnnnnnnnnnnnnnnnnnnnnnnnnnnnnnnnnnnnnnnnnnnnnnnnnnnnnnnnnnnnnnnnnnnnnnnnnnnnnnnnnnnnnnnnnnnnnnnnnnnnnnnnnnnnnnnnnnnnnnnnnnnnnnnnnnnnnnnnnnnnnnnnnnnnnnnnnnnnnnnnnnnnnnnnnnnnnnnnnnnnnnnnnnnnnnnnnnnnnnnnnnnnnnnnnnnnnnnnnnnnnnnnnnnnnnnnnnnnnnnnnnnnnnnnnnnnnnnnnnnnnnnnnnnnnnnnnnnnnnnnnnnnnnnnnnnnnnnnnnnnnnnnnnnnnnnnnnnnnnnnnnnnnnnnnnnnnnnnnnnnnnnnnnnnnnnnnnnnnnnnnnnnnnnnnnnnnnnnnnnnnnnnnnnnnnnnnnnnnnnnnnnnnnnnnnnnnnnnnnnnnnnnnnnnnnnnnnnnnnnnnnnnnnnnnnnnnnnnnnnnnnnnnnnnnnnnnnnnnnnnnnnnnnnnnnnnnnnnnnnnnnnnnnnnnnnnnnnnnnnnnnnnnnnnnnnnnnnnnnnnnnnnnnnnnnnnnnnnnnnnnnnnnnnnnnnnnnnnnnnnnnnnnnnnnnnnnnnnnnnnnnnnnnnnnnnnnnnnnnnnnnnnnnnnnnnnnnnnnnnnnnnnnnnnnnnnnnnnnnnnnnnnnnnnnnnnnnnnnnnnnnnnnnnnnnnnnnnnnnnnnnnnnnnnnnnnnnnnnnnnnnnnnnnnnnnnnnnnnnnnnnnnnnnnnnnnnnnnnnnnnnnnnnnnnnnnnnnnnnnnnnnnnnnnnnnnnnnnnnnnnnnnnnnnnnnnnnnnnnnnnnnnnnnnnnnnnnnnnnnnnnnnnnnnnnnnnnnnnnnnnnnnnnnnnnnnnnnnnnnnnnnnnnnnnnnnnnnnnnnnnnnnnnnnnnnnnnnnnnnnnnnnnnnnnnnnnnnnnnnnnnnnnnnnnnnnnnnnnnnnnnnnnnnnnnnnnnnnnnnnnnnnnnnnnnnnnnnnnnnnnnnnnnnnnnnnnnnnnnnnnnnnnnnnnnnnnnnnnnnnnnnnnnnnnnnnnnnnnnnnnnnnnnnnnnnnnnnnnnnnnnnnnnnnnnnnnnnnnnnnnnnnnnnnnnnnnnnnnnnnnnnnnnnnnnnnnnnnnnnnnnnnnnnnnnnnnnnnnnnnnnnnnnnnnnnnnnnnnnnnnnnnnnnnnnnnnnnnnnnnnnnnnnnnnnnnnnnnnnnnnnnnnnnnnnnnnnnnnnnnnnnnnnnnnnnnnnnnnnnnnnnnnnnnnnnnnnnnnnnnnnnnnnnnnnnnnnnnnnnnnnnnnnnnnnnnnnnnnnnnnnnnnnnnnnnnnnnnnnnnnnnnnnnnnnnnnnnnnnnnnnnnnnnnnnnnnnnnnnnnnnnnnnnnnnnnnnnnnnnnnnnnnnnnnnnnnnnnnnnnnnnnnnnnnnnnnnnnnnnnnnnnnnnnnnnnnnnnnnnnnnnnnnnnnnnnnnnnnnnnnnnnnnnnnnnnnnnnnnnnnnnnnnnnnnnnnnnnnnnnnnnnnnnnnnnnnnnnnnnnnnnnnnnnnnnnnnnnnnnnnnnnnnnnnnnnnnnnnnnnnnnnnnnnnnnnnnnnnnnnnnnnnnnnnnnnnnnnnnnnnnnnnnnnnnnnnnnnnnnnnnnnnnnnnnnnnnnnnnnnnnnnnnnnnnnnnnnnnnnnnnnnnnnnnnnnnnnnnnnnnnnnnnnnnnnnnnnnnnnnnnnnnnnnnnnnnnnnnnnnnnnnnnnnnnnnnnnnnnnnnnnnnnnnnnnnnnnnnnnnnnnnnnnnnnnnnnnnnnnnnnnnnnnnnnnnnnnnnnnnnnnnnnnnnnnnnnnnnnnnnnnnnnnnnnnnnnnnnnnnnnnnnnnnnnnnnnnnnnnnnnnnnnnnnnnnnnnnnnnnnnnnnnnnnnnnnnnnnnnnnnnnnnnnnnnnnnnnnnnnnnnnnnnnnnnnnnnnnnnnnnnnnnnnnnnnnnnnnnnnnnnnnnnnnnnnnnnnnnnnnnnnnnnnnnnnnnnnnnnnnnnnnnnnnnnnnnnnnnnnnnnnnnnnnnnnnnnnnnnnnnnnnnnnnnnnnnnnnnnnnnnnnnnnnnnnnnnnnnnnnnnnnnnnnnnnnnnnnnnnnnnnnnnnnnnnnnnnnnnnnnnnnnnnnnnnnnnnnnnnnnnnnnnnnnnnnnnnnnnnnnnnnnnnnnnnnnnnnnnnnnnnnnnnnnnnnnnnnnnnnnnnnnnnnnnnnnnnnnnnnnnnnnnnnnnnnnnnnnnnnnnnnnnnnnnnnnnnnnnnnnnnnnnnnnnnnnnnnnnnnnnnnnnnnnnnnnnnnnnnnnnnnnnnnnnnnnnnnnnnnnnnnnnnnnnnnnnnnnnnnnnnnnnnnnnnnnnnnnnnnnnnnnnnnnnnnnnnnnnnnnnnnnnnnnnnnnnnnnnnnnnnnnnnnnnnnnnnnnnnnnnnnnnnnnnnnnnnnnnnnnnnnnnnnnnnnnnnnnnnnnnnnnnnnnnnnnnnnnnnnnnnnnnnnnnnnnnnnnnnnnnnnnnnnnnnnnnnnnnnnnnnnnnnnnnnnnnnnnnnnnnnnnnnnnnnnnnnnnnnnnnnnnnnnnnnnnnnnnnnnnnnnnnnnnnnnnnnnnnnnnnnnnnnnnnnnnnnnnnnnnnnnnnnnnnnnnnnnnnnnnnnnnnnnnnnnnnnnnnnnnnnnnnnnnnnnnnnnnnnnnnnnnnnnnnnnnnnnnnnnnnnnnnnnnnnnnnnnnnnnnnnnnnnnnnnnnnnnnnnnnnnnnnnnnnnnnnnnnnnnnnnnnnnnnnnnnnnnnnnnnnnnnnnnnnnnnnnnnnnnnnnnnnnnnnnnnnnnnnnnnnnnnnnnnnnnnnnnnnnnnnnnnnnnnnnnnnnnnnnnnnnnnnnnnnnnnnnnnnnnnnnnnnnnnnnnnnnnnnnnnnnnnnnnnnnnnnnnnnnnnnnnnnnnnnnnnnnnnnnnnnnnnnnnnnnnnnnnnnnnnnnnnnnnnnnnnnnnnnnnnnnnnnnnnnnnnnnnnnnnnnnnnnnnnnnnnnnnnnnnnnnnnnnnnnnnnnnnnnnnnnnnnnnnnnnnnnnnnnnnnnnnnnnnnnnnnnnnnnnnnnnnnnnnnnnnnnnnnnnnnnnnnnnnnnnnnnnnnnnnnnnnnnnnnnnnnnnnnnnnnnnnnnnnnnnnnnnnnnnnnnnnnnnnnnnnnnnnnnnnnnnnnnnnnnnnnnnnnnnnnnnnnnnnnnnnnnnnnnnnnnnnnnnnnnnnnnnnnnnnnnnnnnnnnnnnnnnnnnnnnnnnnnnnnnnnnnnnnnnnnnnnnnnnnnnnnnnnnnnnnnnnnnnnnnnnnnnnnnnnnnnnnnnnnnnnnnnnnnnnnnnnnnnnnnnnnnnnnnnnnnnnnnnnnnnnnnnnnnnnnnnnnnnnnnnnnnnnnnnnnnnnnnnnnnnnnnnnnnnnnnnnnnnnnnnnnnnnnnnnnnnnnnnnnnnnnnnnnnnnnnnnnnnnnnnnnnnnnnnnnnnnnnnnnnnnnnnnnnnnnnnnnnnnnnnnnnnnnnnnnnnnnnnnnnnnnnnnnnnnnnnnnnnnnnnnnnnnnnnnnnnnnnnnnnnnnnnnnnnnnnnnnnnnnnnnnnnnnnnnnnnnnnnnnnnnnnnnnnnnnnnnnnnnnnnnnnnnnnnnnnnnnnnnnnnnnnnnnnnnnnnnnnnnnnnnnnnnnnnnnnnnnnnnnnnnnnnnnnnnnnnnnnnnnnnnnnnnnnnnnnnnnnnnnnnnnnnnnnnnnnnnnnnnnnnnnnnnnnnnnnnnnnnnnnnnnnnnnnnnnnnnnnnnnnnnnnnnnnnnnnnnnnnnnnnnnnnnnnnnnnnnnnnnnnnnnnnnnnnnnnnnnnnnnnnnnnnnnnnnnnnnnnnnnnnnnnnnnnnnnnnnnnnnnnnnnnnnnnnnnnnnnnnnnnnnnnnnnnnnnnnnnnnnnnnnnnnnnnnnnnnnnnnnnnnnnnnnnnnnnnnnnnnnnnnnnnnnnnnnnnnnnnnnnnnnnnnnnnnnnnnnnnnnnnnnnnnnnnnnnnnnnnnnnnnnnnnnnnnnnnnnnnnnnnnnnnnnnnnnnnnnnnnnnnnnnnnnnnnnnnnnnnnnnnnnnnnnnnnnnnnnnnnnnnnnnnnnnnnnnnnnnnnnnnnnnnnnnnnnnnnnnnnnnnnnnnnnnnnnnnnnnnnnnnnnnnnnnnnnnnnnnnnnnnnnnnnnnnnnnnnnnnnnnnnnnnnnnnnnnnnnnnnnnnnnnnnnnnnnnnnnnnnnnnnnnnnnnnnnnnnnnnnnnnnnnnnnnnnnnnnnnnnnnnnnnnnnnnnnnnnnnnnnnnnnnnnnnnnnnnnnnnnnnnnnnnnnnnnnnnnnnnnnnnnnnnnnnnnnnnnnnnnnnnnnnnnnnnnnnnnnnnnnnnnnnnnnnnnnnnnnnnnnnnnnnnnnnnnnnnnnnnnnnnnnnnnnnnnnnnnnnnnnnnnnnnnnnnnnnnnnnnnnnnnnnnnnnnnnnnnnnnnnnnnnnnnnnnnnnnnnnnnnnnnnnnnnnnnnnnnnnnnnnnnnnnnnnnnnnnnnnnnnnnnnnnnnnnnnnnnnnnnnnnnnnnnnnnnnnnnnnnnnnnnnnnnnnnnnnnnnnnnnnnnnnnnnnnnnnnnnnnnnnnnnnnnnnnnnnnnnnnnnnnnnnnnnnnnnnnnnnnnnnnnnnnnnnnnnnnnnnnnnnnnnnnnnnnnnnnnnnnnnnnnnnnnnnnnnnnnnnnnnnnnnnnnnnnnnnnnnnnnnnnnnnnnnnnnnnnnnnnnnnnnnnnnnnnnnnnnnnnnnnnnnnnnnnnnnnnnnnnnnnnnnnnnnnnnnnnnnnnnnnnnnnnnnnnnnnnnnnnnnnnnnnnnnnnnnnnnnnnnnnnnnnnnnnnnnnnnnnnnnnnnnnnnnnnnnnnnnnnnnnnnnnnnnnnnnnnnnnnnnnnnnnnnnnnnnnnnnnnnnnnnnnnnnnnnnnnnnnnnnnnnnnnnnnnnnnnnnnnnnnnnnnnnnnnnnnnnnnnnnnnnnnnnnnnnnnnnnnnnnnnnnnnnnnnnnnnnnnnnnnnnnnnnnnnnnnnnnnnnnnnnnnnnnnnnnnnnnnnnnnnnnnnnnnnnnnnnnnnnnnnnnnnnnnnnnnnnnnnnnnnnnnnnnnnnnnnnnnnnnnnnnnnnnnnnnnnnnnnnnnnnnnnnnnnnnnnnnnnnnnnnnnnnnnnnnnnnnnnnnnnnnnnnnnnnnnnnnnnnnnnnnnnnnnnnnnnnnnnnnnnnnnnnnnnnnnnnnnnnnnnnnnnnnnnnnnnnnnnnnnnnnnnnnnnnnnnnnnnnnnnnnnnnnnnnnnnnnnnnnnnnnnnnnnnnnnnnnnnnnnnnnnnnnnnnnnnnnnnnnnnnnnnnnnnnnnnnnnnnnnnnnnnnnnnnnnnnnnnnnnnnnnnnnnnnnnnnnnnnnnnnnnnnnnnnnnnnnnnnnnnnnnnnnnnnnnnnnnnnnnnnnnnnnnnnnnnnnnnnnnnnnnnnnnnnnnnnnnnnnnnnnnnnnnnnnnnnnnnnnnnnnnnnnnnnnnnnnnnnnnnnnnnnnnnnnnnnnnnnnnnnnnnnnnnnnnnnnnnnnnnnnnnnnnnnnnnnnnnnnnnnnnnnnnnnnnnnnnnnnnnnnnnnnnnnnnnnnnnnnnnnnnnnnnnnnnnnnnnnnnnnnnnnnnnnnnnnnnnnnnnnnnnnnnnnnnnnnnnnnnnnnnnnnnnnnnnnnnnnnnnnnnnnnnnnnnnnnnnnnnnnnnnnnnnnnnnnnnnnnnnnnnnnnnnnnnnnnnnnnnnnnnnnnnnnnnnnnnnnnnnnnnnnnnnnnnnnnnnnnnnnnnnnnnnnnnnnnnnnnnnnnnnnnnnnnnnnnnnnnnnnnnnnnnnnnnnnnnnnnnnnnnnnnnnnnnnnnnnnnnnnnnnnnnnnnnnnnnnnnnnnnnnnnnnnnnnnnnnnnnnnnnnnnnnnnnnnnnnnnnnnnnnnnnnnnnnnnnnnnnnnnnnnnnnnnnnnnnnnnnnnnnnnnnnnnnnnnnnnnnnnnnnnnnnnnnnnnnnnnnnnnnnnnnnnnnnnnnnnnnnnnnnnnnnnnnnnnnnnnnnnnnnnnnnnnnnnnnnnnnnnnnnnnnnnnnnnnnnnnnnnnnnnnnnnnnnnnnnnnnnnnnnnnnnnnnnnnnnnnnnnnnnnnnnnnnnnnnnnnnnnnnnnnnnnnnnnnnnnnnnnnnnnnnnnnnnnnnnnnnnnnnnnnnnnnnnnnnnnnnnnnnnnnnnnnnnnnnnnnnnnnnnnnnnnnnnnnnnnnnnnnnnnnnnnnnnnnnnnnnnnnnnnnnnnnnnnnnnnnnnnnnnnnnnnnnnnnnnnnnnnnnnnnnnnnnnnnnnnnnnnnnnnnnnnnnnnnnnnnnnnnnnnnnnnnnnnnnnnnnnnnnnnnnnnnnnnnnnnnnnnnnnnnnnnnnnnnnnnnnnnnnnnnnnnnnnnnnnnnnnnnnnnnnnnnnnnnnnnnnnnnnnnnnnnnnnnnnnnnnnnnnnnnnnnnnnnnnnnnnnnnnnnnnnnnnnnnnnnnnnnnnnnnnnnnnnnnnnnnnnnnnnnnnnnnnnnnnnnnnnnnnnnnnnnnnnnnnnnnnnnnnnnnnnnnnnnnnnnnnnnnnnnnnnnnnnnnnnnnnnnnnnnnnnnnnnnnnnnnnnnnnnnnnnnnnnnnnnnnnnnnnnnnnnnnnnnnnnnnnnnnnnnnnnnnnnnnnnnnnnnnnnnnnnnnnnnnnnnnnnnnnnnnnnnnnnnnnnnnnnnnnnnnnnnnnnnnnnnnnnnnnnnnnnnnnnnnnnnnnnnnnnnnnnnnnnnnnnnnnnnnnnnnnnnnnnnnnnnnnnnnnnnnnnnnnnnnnnnnnnnnnnnnnnnnnnnnnnnnnnnnnnnnnnnnnnnnnnnnnnnnnnnnnnnnnnnnnnnnnnnnnnnnnnnnnnnnnnnnnnnnnnnnnnnnnnnnnnnnnnnnnnnnnnnnnnnnnnnnnnnnnnnnnnnnnnnnnnnnnnnnnnnnnnnnnnnnnnnnnnnnnnnnnnnnnnnnnnnnnnnnnnnnnnnnnnnnnnnnnnnnnnnnnnnnnnnnnnnnnnnnnnnnnnnnnnnnnnnnnnnnnnnnnnnnnnnnnnnnnnnnnnnnnnnnnnnnnnnnnnnnnnnnnnnnnnnnnnnnnnnnnnnnnnnnnnnnnnnnnnnnnnnnnnnnnnnnnnnnnnnnnnnnnnnnnnnnnnnnnnnnnnnnnnnnnnnnnnnnnnnnnnnnnnnnnnnnnnnnnnnnnnnnnnnnnnnnnnnnnnnnnnnnnnnnnnnnnnnnnnnnnnnnnnnnnnnnnnnnnnnnnnnnnnnnnnnnnnnnnnnnnnnnnnnnnnnnnnnnnnnnnnnnnnnnnnnnnnnnnnnnnnnnnnnnnnnnnnnnnnnnnnnnnnnnnnnnnnnnnnnnnnnnnnnnnnnnnnnnnnnnnnnnnnnnnnnnnnnnnnnnnnnnnnnnnnnnnnnnnnnnnnnnnnnnnnnnnnnnnnnnnnnnnnnnnnnnnnnnnnnnnnnnnnnnnnnnnnnnnnnnnnnnnnnnnnnnnnnnnnnnnnnnnnnnnnnnnnnnnnnnnnnnnnnnnnnnnnnnnnnnnnnnnnnnnnnnnnnnnnnnnnnnnnnnnnnnnnnnnnnnnnnnnnnnnnnnnnnnnnnnnnnnnnnnnnnnnnnnnnnnnnnnnnnnnnnnnnnnnnnnnnnnnnnnnnnnnnnnnnnnnnnnnnnnnnnnnnnnnnnnnnnnnnnnnnnnnnnnnnnnnnnnnnnnnnnnnnnnnnnnnnnnnnnnnnnnnnnnnnnnnnnnnnnnnnnnnnnnnnnnnnnnnnnnnnnnnnnnnnnnnnnnnnnnnnnnnnnnnnnnnnnnnnnnnnnnnnnnnnnnnnnnnnnnnnnnnnnnnnnnnnnnnnnnnnnnnnnnnnnnnnnnnnnnnnnnnnnnnnnnnnnnnnnnnnnnnnnnnnnnnnnnnnnnnnnnnnnnnnnnnnnnnnnnnnnnnnnnnnnnnnnnnnnnnnnnnnnnnnnnnnnnnnnnnnnnnnnnnnnnnnnnnnnnnnnnnnnnnnnnnnnnnnnnnnnnnnnnnnnnnnnnnnnnnnnnnnnnnnnnnnnnnnnnnnnnnnnnnnnnnnnnnnnnnnnnnnnnnnnnnnnnnnnnnnnnnnnnnnnnnnnnnnnnnnnnnnnnnnnnnnnnnnnnnnnnnnnnnnnnnnnnnnnnnnnnnnnnnnnnnnnnnnnnnnnnnnnnnnnnnnnnnnnnnnnnnnnnnnnnnnnnnnnnnnnnnnnnnnnnnnnnnnnnnnnnnnnnnnnnnnnnnnnnnnnnnnnnnnnnnnnnnnnnnnnnnnnnnnnnnnnnnnnnnnnnnnnnnnnnnnnnnnnnnnnnnnnnnnnnnnnnnnnnnnnnnnnnnnnnnnnnnnnnnnnnnnnnnnnnnnnnnnnnnnnnnnnnnnnnnnnnnnnnnnnnnnnnnnnnnnnnnnnnnnnnnnnnnnnnnnnnnnnnnnnnnnnnnnnnnnnnnnnnnnnnnnnnnnnnnnnnnnnnnnnnnnnnnnnnnnnnnnnnnnnnnnnnnnnnnnnnnnnnnnnnnnnnnnnnnnnnnnnnnnnnnnnnnnnnnnnnnnnnnnnnnnnnnnnnnnnnnnnnnnnnnnnnnnnnnnnnnnnnnnnnnnnnnnnnnnnnnnnnnnnnnnnnnnnnnnnnnnnnnnnnnnnnnnnnnnnnnnnnnnnnnnnnnnnnnnnnnnnnnnnnnnnnnnnnnnnnnnnnnnnnnnnnnnnnnnnnnnnnnnnnnnnnnnnnnnnnnnnnnnnnnnnnnnnnnnnnnnnnnnnnnnnnnnnnnnnnnnnnnnnnnnnnnnnnnnnnnnnnnnnnnnnnnnnnnnnnnnnnnnnnnnnnnnnnnnnnnnnnnnnnnnnnnnnnnnnnnnnnnnnnnnnnnnnnnnnnnnnnnnnnnnnnnnnnnnnnnnnnnnnnnnnnnnnnnnnnnnnnnnnnnnnnnnnnnnnnnnnnnnnnnnnnnnnnnnnnnnnnnnnnnnnnnnnnnnnnnnnnnnnnnnnnnnnnnnnnnnnnnnnnnnnnnnnnnnnnnnnnnnnnnnnnnnnnnnnnnnnnnnnnnnnnnnnnnnnnnnnnnnnnnnnnnnnnnnnnnnnnnnnnnnnnnnnnnnnnnnnnnnnnnnnnnnnnnnnnnnnnnnnnnnnnnnnnnnnnnnnnnnnnnnnnnnnnnnnnnnnnnnnnnnnnnnnnnnnnnnnnnnnnnnnnnnnnnnnnnnnnnnnnnnnnnnnnnnnnnnnnnnnnnnnnnnnnnnnnnnnnnnnnnnnnnnnnnnnnnnnnnnnnnnnnnnnnnnnnnnnnnnnnnnnnnnnnnnnnnnnnnnnnnnnnnnnnnnnnnnnnnnnnnnnnnnnnnnnnnnnnnnnnnnnnnnnnnnnnnnnnnnnnnnnnnnnnnnnnnnnnnnnnnnnnnnnnnnnnnnnnnnnnnnnnnnnnnnnnnnnnnnnnnnnnnnnnnnnnnnnnnnnnnnnnnnnnnnnnnnnnnnnnnnnnnnnnnnnnnnnnnnnnnnnnnnnnnnnnnnnnnnnnnnnnnnnnnnnnnnnnnnnnnnnnnnnnnnnnnnnnnnnnnnnnnnnnnnnnnnnnnnnnnnnnnnnnnnnnnnnnnnnnnnnnnnnnnnnnnnnnnnnnnnnnnnnnnnnnnnnnnnnnnnnnnnnnnnnnnnnnnnnnnnnnnnnnnnnnnnnnnnnnnnnnnnnnnnnnnnnnnnnnnnnnnnnnnnnnnnnnnnnnnnnnnnnnnnnnnnnnnnnnnnnnnnnnnnnnnnnnnnnnnnnnnnnnnnnnnnnnnnnnnnnnnnnnnnnnnnnnnnnnnnnnnnnnnnnnnnnnnnnnnnnnnnnnnnnnnnnnnnnnnnnnnnnnnnnnnnnnnnnnnnnnnnnnnnnnnnnnnnnnnnnnnnnnnnnnnnnnnnnnnnnnnnnnnnnnnnnnnnnnnnnnnnnnnnnnnnnnnnnnnnnnnnnnnnnnnnnnnnnnnnnnnnnnnnnnnnnnnnnnnnnnnnnnnnnnnnnnnnnnnnnnnnnnnnnnnnnnnnnnnnnnnnnnnnnnnnnnnnnnnnnnnnnnnnnnnnnnnnnnnnnnnnnnnnnnnnnnnnnnnnnnnnnnnnnnnnnnnnnnnnnnnnnnnnnnnnnnnnnnnnnnnnnnnnnnnnnnnnnnnnnnnnnnnnnnnnnnnnnnnnnnnnnnnnnnnnnnnnnnnnnnnnnnnnnnnnnnnnnnnnnnnnnnnnnnnnnnnnnnnnnnnnnnnnnnnnnnnnnnnnnnnnnnnnnnnnnnnnnnnnnnnnnnnnnnnnnnnnnnnnnnnnnnnnnnnnnnnnnnnnnnnnnnnnnnnnnnnnnnnnnnnnnnnnnnnnnnnnnnnnnnnnnnnnnnnnnnnnnnnnnnnnnnnnnnnnnnnnnnnnnnnnnnnnnnnnnnnnnnnnnnnnnnnnnnnnnnnnnnnnnnnnnnnnnnnnnnnnnnnnnnnnnnnnnnnnnnnnnnnnnnnnnnnnnnnnnnnnnnnnnnnnnnnnnnnnnnnnnnnnnnnnnnnnnnnnnnnnnnnnnnnnnnnnnnnnnnnnnnnnnnnnnnnnnnnnnnnnnnnnnnnnnnnnnnnnnnnnnnnnnnnnnnnnnnnnnnnnnnnnnnnnnnnnnnnnnnnnnnnnnnnnnnnnnnnnnnnnnnnnnnnnnnnnnnnnnnnnnnnnnnnnnnnnnnnnnnnnnnnnnnnnnnnnnnnnnnnnnnnnnnnnnnnnnnnnnnnnnnnnnnnnnnnnnnnnnnnnnnnnnnnnnnnnnnnnnnnnnnnnnnnnnnnnnnnnnnnnnnnnnnnnnnnnnnnnnnnnnnnnnnnnnnnnnnnnnnnnnnnnnnnnnnnnnnnnnnnnnnnnnnnnnnnnnnnnnnnnnnnnnnnnnnnnnnnnnnnnnnnnnnnnnnnnnnnnnnnnnnnnnnnnnnnnnnnnnnnnnnnnnnnnnnnnnnnnnnnnnnnnnnnnnnnnnnnnnnnnnnnnnnnnnnnnnnnnnnnnnnnnnnnnnnnnnnnnnnnnnnnnnnnnnnnnnnnnnnnnnnnnnnnnnnnnnnnnnnnnnnnnnnnnnnnnnnnnnnnnnnnnnnnnnnnnnnnnnnnnnnnnnnnnnnnnnnnnnnnnnnnnnnnnnnnnnnnnnnnnnnnnnnnnnnnnnnnnnnnnnnnnnnnnnnnnnnnnnnnnnnnnnnnnnnnnnnnnnnnnnnnnnnnnnnnnnnnnnnnnnnnnnnnnnnnnnnnnnnnnnnnnnnnnnnnnnnnnnnnnnnnnnnnnnnnnnnnnnnnnnnnnnnnnnnnnnnnnnnnnnnnnnnnnnnnnnnnnnnnnnnnnnnnnnnnnnnnnnnnnnnnnnnnnnnnnnnnnnnnnnnnnnnnnnnnnnnnnnnnnnnnnnnnnnnnnnnnnnnnnnnnnnnnnnnnnnnnnnnnnnnnnnnnnnnnnnnnnnnnnnnnnnnnnnnnnnnnnnnnnnnnnnnnnnnnnnnnnnnnnnnnnnnnnnnnnnnnnnnnnnnnnnnnnnnnnnnnnnnnnnnnnnnnnnnnnnnnnnnnnnnnnnnnnnnnnnnnnnnnnnnnnnnnnnnnnnnnnnnnnnnnnnnnnnnnnnnnnnnnnnnnnnnnnnnnnnnnnnnnnnnnnnnnnnnnnnnnnnnnnnnnnnnnnnnnnnnnnnnnnnnnnnnnnnnnnnnnnnnnnnnnnnnnnnnnnnnnnnnnnnnnnnnnnnnnnnnnnnnnnnnnnnnnnnnnnnnnnnnnnnnnnnnnnnnnnnnnnnnnnnnnnnnnnnnnnnnnnnnnnnnnnnnnnnnnnnnnnnnnnnnnnnnnnnnnnnnnnnnnnnnnnnnnnnnnnnnnnnnnnnnnnnnnnnnnnnnnnnnnnnnnnnnnnnnnnnnnnnnnnnnnnnnnnnnnnnnnnnnnnnnnnnnnnnnnnnnnnnnnnnnnnnnnnnnnnnnnnnnnnnnnnnnnnnnnnnnnnnnnnnnnnnnnnnnnnnnnnnnnnnnnnnnnnnnnnnnnnnnnnnnnnnnnnnnnnnnnnnnnnnnnnnnnnnnnnnnnnnnnnnnnnnnnnnnnnnnnnnnnnnnnnnnnnnnnnnnnnnnnnnnnnnnnnnnnnnnnnnnnnnnnnnnnnnnnnnnnnnnnnnnnnnnnnnnnnnnnnnnnnnnnnnnnnnnnnnnnnnnnnnnnnnnnnnnnnnnnnnnnnnnnnnnnnnnnnnnnnnnnnnnnnnnnnnnnnnnnnnnnnnnnnnnnnnnnnnnnnnnnnnnnnnnnnnnnnnnnnnnnnnnnnnnnnnnnnnnnnnnnnnnnnnnnnnnnnnnnnnnnnnnnnnnnnnnnnnnnnnnnnnnnnnnnnnnnnnnnnnnnnnnnnnnnnnnnnnnnnnnnnnnnnnnnnnnnnnnnnnnnnnnnnnnnnnnnnnnnnnnnnnnnnnnnnnnnnnnnnnnnnnnnnnnnnnnnnnnnnnnnnnnnnnnnnnnnnnnnnnnnnnnnnnnnnnnnnnnnnnnnnnnnnnnnnnnnnnnnnnnnnnnnnnnnnnnnnnnnnnnnnnnnnnnnnnnnnnnnnnnnnnnnnnnnnnnnnnnnnnnnnnnnnnnnnnnnnnnnnnnnnnnnnnnnnnnnnnnnnnnnnnnnnnnnnnnnnnnnnnnnnnnnnnnnnnnnnnnnnnnnnnnnnnnnnnnnnnnnnnnnnnnnnnnnnnnnnnnnnnnnnnnnnnnnnnnnnnnnnnnnnnnnnnnnnnnnnnnnnnnnnnnnnnnnnnnnnnnnnnnnnnnnnnnnnnnnnnnnnnnnnnnnnnnnnnnnnnnnnnnnnnnnnnnnnnnnnnnnnnnnnnnnnnnnnnnnnnnnnnnnnnnnnnnnnnnnnnnnnnnnnnnnnnnnnnnnnnnnnnnnnnnnnnnnnnnnnnnnnnnnnnnnnnnnnnnnnnnnnnnnnnnnnnnnnnnnnnnnnnnnnnnnnnnnnnnnnnnnnnnnnnnnnnnnnnnnnnnnnnnnnnnnnnnnnnnnnnnnnnnnnnnnnnnnnnnnnnnnnnnnnnnnnnnnnnnnnnnnnnnnnnnnnnnnnnnnnnnnnnnnnnnnnnnnnnnnnnnnnnnnnnnnnnnnnnnnnnnnnnnnnnnnnnnnnnnnnnnnnnnnnnnnnnnnnnnnnnnnnnnnnnnnnnnnnnnnnnnnnnnnnnnnnnnnnnnnnnnnnnnnnnnnnnnnnnnnnnnnnnnnnnnnnnnnnnnnnnnnnnnnnnnnnnnnnnnnnnnnnnnnnnnnnnnnnnnnnnnnnnnnnnnnnnnnnnnnnnnnnnnnnnnnnnnnnnnnnnnnnnnnnnnnnnnnnnnnnnnnnnnnnnnnnnnnnnnnnnnnnnnnnnnnnnnnnnnnnnnnnnnnnnnnnnnnnnnnnnnnnnnnnnnnnnnnnnnnnnnnnnnnnnnnnnnnnnnnnnnnnnnnnnnnnnnnnnnnnnnnnnnnnnnnnnnnnnnnnnnnnnnnnnnnnnnnnnnnnnnnnnnnnnnnnnnnnnnnnnnnnnnnnnnnnnnnnnnnnnnnnnnnnnnnnnnnnnnnnnnnnnnnnnnngatctagtcagcttaatccctcggatgcaaagcttgttcaacatatgcaaatcaataaatgtattccatcacataaacagaactaatgacaaaaaccacatgattatctcaatagatgcaaaaaaggccttcagcaaaattcaacacctcttcatggtaaaaactctcaatgaattatgtattgatggaacttatctcaacatattaagagctatttatgacaaacgcacagccaatatactgaatgggaaaaaacttgaaacattccttttgaaaatctgcacaaaacaagaataccctctctcatcactcctattcaatatagtattggaagttctggccagggcaatcagtcaagagaaagaaacaaagcgtaatcaaataggaagaggaactcaagttgtctctgtttgcagctgacatgattgtatatttagaaaaccccatcgtctcagcccaaaatctccttaaaccaatatgcaacttcaaaaaagtctcagtatacaaaatcagtgttcaaaaatcacaagaattcctatacacaataatagacaaacagagagccaaatcatgcatgaactctcattcacaattgttacaaagagaataaaatacctaggaatccaacttaaaagggatgggaaggacttcttcaaggagatctacaaaccactgctcaaggaaataagagaggacacaaacaaatgaaaaacaatccgtgctcatggataggaagaatcaatattgtgaaaatggccatactgcccaaagtaatttataaattcagtgttatccccatcaagctcccattgactttctttacataattagaaaaaaaactactttaaatttcatatggaatcaaaaaagatcctgcatagacaagacaatcctaagcaaaaagaacaaaagtggaggcatcacactagctatcttcaaactatactaaaaggccacagtaaccaagacagtatggtactggtaccaaaacagatatattgacaaatggaacagaacagaggccccagaaataacatcaaacatctacaaccatctgatctttgatgaacctgacaaaaacaagtaatggggaaaggattccttatttaataaatggtgttgggaaaactagatagccatatgcaaaaaaatgaaactggacgtcttccttactagttatacaaaaattaactgaagatggattaaagacttaaatgtaagacttaaaaccataaaaaccccccaaaaaacaaaggcattaccattcaggacataggcgtgggcaaagacttcatgactaaaacagcaaaaacaatggcaacaaaagccaaaattgacaaacgagatgtaattaaagtaaagagcttcttcacaacaaaagaaactatcatcagagtgaacaggcaacccacagaaaggagaaaatttatgcaatctatccatctgacaatgggctaatatgcagaatctacaaaaaacttaagcaaatttacaagaaaaaaacaaacaaccatatcaaaaatgggcaaaggacatgaacagacacttctgaaaagaagacatttatgcagccaacaaacatatgaaaaaaaaactcatcatcactggtcattagataaatgcaaatcaaaaacacagtgagaaaccatctcactccagttagaatggtgatcattggaaaaatcaggaaacaacagatgctggagaggatgtggagaaataggaacacttttacactgttggtgagagtgtaaattagttcaaccattgtggaagacagtatggcaattcctcaaggatctacaatgagaaataccatttgatccagcaatcccattactgggtatataaccaaatgattataaattattctactacttagacacatgcaaacatatgtttattatggcactgtgcacaagagcaaaaactttgaaccaaaccaaatgcccatcagtggtagaatgaataaagaaaatgtggcatgtatacatcatggaatacaatgcagtcataaaaaggatgagttcatgtcctttgcagggacatggatgaagctggaaaccaccattctcagcaaactaacacaagagtagaaaagcaaacatcacatgttctctctcatagttgggagttaaacaaagagaacacagggacacaggaaggggaacaccacacactggagcctgtcaggaagtgggggactatgggagggatagcattagaagatatattcctggcctaggccactattgcgattttctaaattttgtttcaaaaacatgatgtttcaaaaattgttattgatatgtaattatacaaatatatagttcagaaaaaagaatcaacattaattatgctttttccaaaatactttatggttttgagctcttctagcagtgacatttttgctgtaggtagttgctctatatctggtatattcatcatagcatcctttgtaccctttacacttatccttcaatttcccactctccttaagtgtaaattttcaaggccagagctcccatatcttcccaatattactttttgaaaagaagctcctatgtactgttttgtctgggtcttgttggatataatgctaaaagagctggaaaataataattttttaaaaaattcggtgatgaaattaaggtaaatatattttataaatctaatgaacaaaatgaggccagctgagaacacaatgatagttgaagaagaacctgagatcctgtttctctcaatggatgtatgaacttaactgcaattgggtgagcaaagccagttgagtttgtagcacccctcatgagaaaaaagccaaccataaccacatttagaagaaagaaaatttggttacatttctgcactacagaacagtgcagttagataaaattctgtccattccatgattctccctcgggaaagaaaacagagtgaaacgtgtatgcaaacttctgacttattgatttatacctttaacatttagtgttgaccagaatagagatagagtttaaatgacagcttgggtcgactgagaataaagataaatatttcttacaacaaagagactgtagtgcctgcaacagtgacaaagagaagagactaaaggctcctaagaggaaagagaggtaaaccttattaacaagaaaatacatacagtacaaagaagacacattttgacaacagattggagaagctcccggaatgactagtgtggctgaatattgtcaattttcccatgtacaaagctttttcataaaggataaaataggtagtggtttcttaattgaccaaaaccttaacaaaaccacagtacttaaaagcaaccaggaaatatagcctaatgaaacgagaaaaatatatattcaagtgaccctaaagaagtggagatctatgaattattttttaacttaaaatcattttatttttctttattttttcattttatacacaggatcttactctatctcctgggacagattgcagtggtgcaatcacagctcactgtaacctcaaatttctgaagtaaagcagtcatgcctcctatgtctcctgagtaaatatgaccacagttgggcacactaccacacctgtatagtttctttaaaagaatctgtacaaacagaatgttgttatgttgcctcggctggtctcaaactcctggtctcaggcaatcctactgcctcagtctgaaagtgctggcatgagccaccatacctggaattgtttctcttttaagaaaaaaggactttaaatcattaatagtaaaataaaacaaagaaaggcattgcataacgatagagagttcaattcaacaagaagacttaactatcctaaatatagatgcacccaactttggggaacatagagttatacaacaagtactgctagacctacaataagactcaagtagccacgcaataatagtagggaaacgcaactccccaataacagtgtttgtcagattatctaggcagaaacttaacaaagaaattctggagtttgatttcgcacttgatcaattgaaactaatagacatttatagtatacaccacacatcatctaaggaacataaattcttctcatcgctcacagaatatactctaggattgaccacttcctagccataaagcaattatccatacattttttaaaaatgaaaattatgccaaccatactgtcaggccacaatggaaaaaagataaatatcaataccaacaaaatctcacaaaatcacagaatggcattgaaattaaacaacttgctcctgaatgaattttgggtaaacaacaaaattgaggcagaaacttaaaaaaaatttgaaataaatgaagagacacaatatactaaaatgtctgggttgtaggaaaagctctgttaagaggaaagttgagagtgctaaatacctgcatcaagaagttagaatgatctcaaactaacaatttaacatcacacttagagaaactagaaaaacaaaaacaaactaaccccaaagctggcagaatggcaaaaatattcacaacctataaacctgacaaaatctaatactcagaatctataagaaacttaaagaattcacaagcaaaaaattaccccatgaaaaagtgggcaataacagacaatgttcaaaagaatacatacaagtggccaaacaacatgaaaaaagcttatcactaaccatcaaggaaatgtaaataaaaaccacagtaagacaccatcgtacaccagttagaatggcttttgttaaaaagtaaaatgatagtagatattggtggggttttagagggaaaaaaccacttatacactgtttataggaatataaattagttcagccactgtggagagcagcttggagattttccaaataactgagagttgaactatgattcaacgcagaatttcaccgctgggtgtatacccagaagagaataaactattctaccaaaacagcacatgcacttgttggttcatcactgcattatttataacaggaaagacatgaatcaacctacgtgactattaatggtatttttttttttttgagatgaagtctcactctgttgcccaggctggagtgcagtggcactatctcagctcactacaacctccacctcccaggttcaagcaattctcctgcctcagccacccgagtagctgggactacaggctcatgacaacacgtccggctaacttttgtattttcagtagagacgggggtttcattatgctgtccaggatggtctcgatctcctgacctcatgatccactcaccttggcctcccacagtgctgggattacaggcatcagccaccgtgtccagcctattaatgctaaattgaatttaaaaagtgtcacatgtacagcaatactacttagcaaaaacaacaacaacaacaaaaaaacttgtcctttgcagcaacattaatacaactaaaggtcattctacaatcaaatnnnnnnnnnnnnnnnnnnnnnnnnnnnnnnnnnnnnnnnnnnnnnnnnnnnnnnnnnnnnnnnnnnnnnnnnnnnnnnnnnnnnnnnnnnnnnnnnnnnnnnnnnnnnnnnnnnnnnnnnnnnnnnnnnnnnnnnnnnnnnnnnnnnnnnnnnnnnnnnnnnnnnnnnnnnnnnnnnnnnnnnnnnnnnnnnnnnnnnnnnnnnnnnnnnnnnnnnnnnnnnnnnnnnnnnnnnnnnnnnnnnnnnnnnnnnnnnnnnnnnnnnnnnnnnnnnnnnnnnnnnnnnnnnnnnnnnnnnnnnnnnnnnnnnnnnnnnnnnnnnnnnnnnnnnnnnnnnnnnnnnnnnnnnnnnnnnnnnnnnnnnnnnnnnnnnnnnnnnnnnnnnnnnnnnnnnnnnnnnnnnnnnnnnnnnnnnnnnnnnnnnnnnnnnnnnnnnnnnnnnnnnnnnnnnnnnnnnnnnnnnnnnnnnnnnnnnnnnnnnnnnnnnnnnnnnnnnnnnnnnnnnnnnnnnnnnnnnnnnnnnnnnnnnnnnnnnnnnnnnnnnnnnnnnnnnnnnnnnnnnnnnnnnnnnnnnnnnnnnnnnnnnnnnnnnnnnnnnnnnnnnnnnnnnnnnnnnnnnnnnnnnnnnnnnnnnnnnnnnnnnnnnnnnnnnnnnnnnnnnnnnnnnnnnnnnnnnnnnnnnnnnnnnnnnnnnnnnnnnnnnnnnnnnnnnnnnnnnnnnnnnnnnnnnnnnnnnnnnnnnnnnnnnnnnnnnnnnnnnnnnnnnnnnnnnnnnnnnnnnnnnnnnnnnnnnnnnnnnnnnnnnnnnnnnnnnnnnnnnnnnnnnnnnnnnnnnnnnnnnnnnnnnnnnnnnnnnnnnnnnnnnnnnnnnnnnnnnnnnnnnnnnnnnnnnnnnnnnnnnnnnnnnnnnnnnnnnnnnnnnnnnnnnnnnnnnnnnnnnnnnnnnnnnnnnnnnnnnnnnnnnnnnnnnnnnnnnnnnnnnnnnnnnnnnnnnnnnnnnnnnnnnnnnnnnnnnnnnnnnnnnnnnnnnnnnnnnnnnnnnnnnnnnnnnnnnnnnnnnnnnnnnnnnnnnnnnnnnnnnnnnnnnnnnnnnnnnnnnnnnnnnnnnnnnnnnnnnnnnnnnnnnnnnnnnnnnnnnnnnnnnnnnnnnnnnnnnnnnnnnnnnnnnnnnnnnnnnnnnnnnnnnnnnnnnnnnnnnnnnnnnnnnnnnnnnnnnnnnnnnnnnnnnnnnnnnnnnnnnnnnnnnnnnnnnnnnnnnnnnnnnnnnnnnnnnnnnnnnnnnnnnnnnnnnnnnnnnnnnnnnnnnnnnnnnnnnnnnnnnnnnnnnnnnnnnnnnnnnnnnnnnnnnnnnnnnnnnnnnnnnnnnnnnnnnnnnnnnnnnnnnnnnnnnnnnnnnnnnnnnnnnnnnnnnnnnnnnnnnnnnnnnnnnnnnnnnnnnnnnnnnnnnnnnnnnnnnnnnnnnnnnnnnnnnnnnnnnnnnnnnnnnnnnnnnnnnnnnnnnnnnnnnnnnnnnnnnnnnnnnnnnnnnnnnnnnnnnnnnnnnnnnnnnnnnnnnnnnnnnnnnnnnnnnnnnnnnnnnnnnnnnnnnnnnnnnnnnnnnnnnnnnnnnnnnnnnnnnnnnnnnnnnnnnnnnnnnnnnnnnnnnnnnnnnnnnnnnnnnnnnnnnnnnnnnnnnnnnnnnnnnnnnnnnnnnnnnnnnnnnnnnnnnnnnnnnnnnnnnnnnnnnnnnnnnnnnnnnnnnnnnnnnnnnnnnnnnnnnnnnnnnnnnnnnnnnnnnnnnnnnnnnnnnnnnnnnnnnnnnnnnnnnnnnnnnnnnnnnnnnnnnnnnnnnnnnnnnnnnnnnnnnnnnnnnnnnnnnnnnnnnnnnnnnnnnnnnnnnnnnnnnnnnnnnnnnnnnnnnnnnnnnnnnnnnnnnnnnnnnnnnnnnnnnnnnnnnnnnnnnnnnnnnnnnnnnnnnnnnnnnnnnnnnnnnnnnnnnnnnnnnnnnnnnnnnnnnnnnnnnnnnnnnnnnnnnnnnnnnnnnnnnnnnnnnnnnnnnnnnnnnnnnnnnnnnnnnnnnnnnnnnnnnnnnnnnnnnnnnnnnnnnnnnnnnnnnnnnnnnnnnnnnnnnnnnnnnnnnnnnnnnnnnnnnnnnnnnnnnnnnnnnnnnnnnnnnnnnnnnnnnnnnnnnnnnnnnnnnnnnnnnnnnnnnnnnnnnnnnnnnnnnnnnnnnnnnnnnnnnnnnnnnnnnnnnnnnnnnnnnnnnnnnnnnnnnnnnnnnnnnnnnnnnnnnnnnnnnnnnnnnnnnnnnnnnnnnnnnnnnnnnnnnnnnnnnnnnnnnnnnnnnnnnnnnnnnnnnnnnnnnnnnnnnnnnnnnnnnnnnnnnnnnnnnnnnnnnnnnnnnnnnnnnnnnnnnnnnnnnnnnnnnnnnnnnnnnnnnnnnnnnnnnnnnnnnnnnnnnnnnnnnnnnnnnnnnnnnnnnnnnnnnnnnnnnnnnnnnnnnnnnnnnnnnnnnnnnnnnnnnnnnnnnnnnnnnnnnnnnnnnnnnnnnnnnnnnnnnnnnnnnnnnnnnnnnnnnnnnnnnnnnnnnnnnnnnnnnnnnnnnnnnnnnnnnnnnnnnnnnnnnnnnnnnnnnnnnnnnnnnnnnnnnnnnnnnnnnnnnnnnnnnnnnnnnnnnnnnnnnnnnnnnnnnnnnnnnnnnnnnnnnnnnnnnnnnnnnnnnnnnnnnnnnnnnnnnnnnnnnnnnnnnnnnnnnnnnnnnnnnnnnnnnnnnnnnnnnnnnnnnnnnnnnnnnnnnnnnnnnnnnnnnnnnnnnnnnnnnnnnnnnnnnnnnnnnnnnnnnnnnnnnnnnnnnnnnnnnnnnnnnnnnnnnnnnnnnnnnnnnnnnnnnnnnnnnnnnnnnnnnnnnnnnnnnnnnnnnnnnnnnnnnnnnnnnnnnnnnnnnnnnnnnnnnnnnnnnnnnnnnnnnnnnnnnnnnnnnnnnnnnnnnnnnnnnnnnnnnnnnnnnnnnnnnnnnnnnnnnnnnnnnnnnnnnnnnnnnnnnnnnnnnnnnnnnnnnnnnnnnnnnnnnnnnnnnnnnnnnnnnnnnnnnnnnnnnnnnnnnnnnnnnnnnnnnnnnnnnnnnnnnnnnnnnnnnnnnnnnnnnnnnnnnnnnnnnnnnnnnnnnnnnnnnnnnnnnnnnnnnnnnnnnnnnnnnnnnnnnnnnnnnnnnnnnnnnnnnnnnnnnnnnnnnnnnnnnnnnnnnnnnnnnnnnnnnnnnnnnnnnnnnnnnnnnnnnnnnnnnnnnnnnnnnnnnnnnnnnnnnnnnnnnnnnnnnnnnnnnnnnnnnnnnnnnnnnnnnnnnnnnnnnnnnnnnnnnnnnnnnnnnnnnnnnnnnnnnnnnnnnnnnnnnnnnnnnnnnnnnnnnnnnnnnnnnnnnnnnnnnnnnnnnnnnnnnnnnnnnnnnnnnnnnnnnnnnnnnnnnnnnnnnnnnnnnnnnnnnnnnnnnnnnnnnnnnnnnnnnnnnnnnnnnnnnnnnnnnnnnnnnnnnnnnnnnnnnnnnnnnnnnnnnnnnnnnnnnnnnnnnnnnnnnnnnnnnnnnnnnnnnnnnnnnnnnnnnnnnnnnnnnnnnnnnnnnnnnnnnnnnnnnnnnnnnnnnnnnnnnnnnnnnnnnnnnnnnnnnnnnnnnnnnnnnnnnnnnnnnnnnnnnnnnnnnnnnnnnnnnnnnnnnnnnnnnnnnnnnnnnnnnnnnnnnnnnnnnnnnnnnnnnnnnnnnnnnnnnnnnnnnnnnnnnnnnnnnnnnnnnnnnnnnnnnnnnnnnnnnnnnnnnnnnnnnnnnnnnnnnnnnnnnnnnnnnnnnnnnnnnnnnnnnnnnnnnnnnnnnnnnnnnnnnnnnnnnnnnnnnnnnnnnnnnnnnnnnnnnnnnnnnnnnnnnnnnnnnnnnnnnnnnnnnnnnnnnnnnnnnnnnnnnnnnnnnnnnnnnnnnnnnnnnnnnnnnnnnnnnnnnnnnnnnnnnnnnnnnnnnnnnnnnnnnnnnnnnnnnnnnnnnnnnnnnnnnnnnnnnnnnnnnnnnnnnnnnnnnnnnnnnnnnnnnnnnnnnnnnnnnnnnnnnnnnnnnnnnnnnnnnnnnnnnnnnnnnnnnnnnnnnnnnnnnnnnnnnnnnnnnnnnnnnnnnnnnnnnnnnnnnnnnnnnnnnnnnnnnnnnnnnnnnnnnnnnnnnnnnnnnnnnnnnnnnnnnnnnnnnnnnnnnnnnnnnnnnnnnnnnnnnnnnnnnnnnnnnnnnnnnnnnnnnnnnnnnnnnnnnnnnnnnnnnnnnnnnnnnnnnnnnnnnnnnnnnnnnnnnnnnnnnnnnnnnnnnnnnnnnnnnnnnnnnnnnnnnnnnnnnnnnnnnnnnnnnnnnnnnnnnnnnnnnnnnnnnnnnnnnnnnnnnnnnnnnnnnnnnnnnnnnnnnnnnnnnnnnnnnnnnnnnnnnnnnnnnnnnnnnnnnnnnnnnnnnnnnnnnnnnnnnnnnnnnnnnnnnnnnnnnnnnnnnnnnnnnnnnnnnnnnnnnnnnnnnnnnnnnnnnnnnnnnnnnnnnnnnnnnnnnnnnnnnnnnnnnnnnnnnnnnnnnnnnnnnnnnnnnnnnnnnnnnnnnnnnnnnnnnnnnnnnnnnnnnnnnnnnnnnnnnnnnnnnnnnnnnnnnnnnnnnnnnnnnnnnnnnnnnnnnnnnnnnnnnnnnnnnnnnnnnnnnnnnnnnnnnnnnnnnnnnnnnnnnnnnnnnnnnnnnnnnnnnnnnnnnnnnnnnnnnnnnnnnnnnnnnnnnnnnnnnnnnnnnnnnnnnnnnnnnnnnnnnnnnnnnnnnnnnnnnnnnnnnnnnnnnnnnnnnnnnnnnnnnnnnnnnnnnnnnnnnnnnnnnnnnnnnnnnnnnnnnnnnnnnnnnnnnnnnnnnnnnnnnnnnnnnnnnnnnnnnnnnnnnnnnnnnnnnnnnnnnnnnnnnnnnnnnnnnnnnnnnnnnnnnnnnnnnnnnnnnnnnnnnnnnnnnnnnnnnnnnnnnnnnnnnnnnnnnnnnnnnnnnnnnnnnnnnnnnnnnnnnnnnnnnnnnnnnnnnnnnnnnnnnnnnnnnnnnnnnnnnnnnnnnnnnnnnnnnnnnnnnnnnnnnnnnnnnnnnnnnnnnnnnnnnnnnnnnnnnnnnnnnnnnnnnnnnnnnnnnnnnnnnnnnnnnnnnnnnnnnnnnnnnnnnnnnnnnnnnnnnnnnnnnnnnnnnnnnnnnnnnnnnnnnnnnnnnnnnnnnnnnnnnnnnnnnnnnnnnnnnnnnnnnnnnnnnnnnnnnnnnnnnnnnnnnnnnnnnnnnnnnnnnnnnnnnnnnnnnnnnnnnnnnnnnnnnnnnnnnnnnnnnnnnnnnnnnnnnnnnnnnnnnnnnnnnnnnnnnnnnnnnnnnnnnnnnnnnnnnnnnnnnnnnnnnnnnnnnnnnnnnnnnnnnnnnnnnnnnnnnnnnnnnnnnnnnnnnnnnnnnnnnnnnnnnnnnnnnnnnnnnnnnnnnnnnnnnnnnnnnnnnnnnnnnnnnnnnnnnnnnnnnnnnnnnnnnnnnnnnnnnnnnnnnnnnnnnnnnnnnnnnnnnnnnnnnnnnnnnnnnnnnnnnnnnnnnnnnnnnnnnnnnnnnnnnnnnnnnnnnnnnnnnnnnnnnnnnnnnnnnnnnnnnnnnnnnnnnnnnnnnnnnnnnnnnnnnnnnnnnnnnnnnnnnnnnnnnnnnnnnnnnnnnnnnnnnnnnnnnnnnnnnnnnnnnnnnnnnnnnnnnnnnnnnnnnnnnnnnnnnnnnnnnnnnnnnnnnnnnnnnnnnnnnnnnnnnnnnnnnnnnnnnnnnnnnnnnnnnnnnnnnnnnnnnnnnnnnnnnnnnnnnnnnnnnnnnnnnnnnnnnnnnnnnnnnnnnnnnnnnnnnnnnnnnnnnnnnnnnnnnnnnnnnnnnnnnnnnnnnnnnnnnnnnnnnnnnnnnnnnnnnnnnnnnnnnnnnnnnnnnnnnnnnnnnnnnnnnnnnnnnnnnnnnnnnnnnnnnnnnnnnnnnnnnnnnnnnnnnnnnnnnnnnnnnnnnnnnnnnnnnnnnnnnnnnnnnnnnnnnnnnnnnnnnnnnnnnnnnnnnnnnnnnnnnnnnnnnnnnnnnnnnnnnnnnnnnnnnnnnnnnnnnnnnnnnnnnnnnnnnnnnnnnnnnnnnnnnnnnnnnnnnnnnnnnnnnnnnnnnnnnnnnnnnnnnnnnnnnnnnnnnnnnnnnnnnnnnnnnnnnnnnnnnnnnnnnnnnnnnnnnnnnnnnnnnnnnnnnnnnnnnnnnnnnnnnnnnnnnnnnnnnnnnnnnnnnnnnnnnnnnnnnnnnnnnnnnnnnnnnnnnnnnnnnnnnnnnnnnnnnnnnnnnnnnnnnnnnnnnnnnnnnnnnnnnnnnnnnnnnnnnnnnnnnnnnnnnnnnnnnnnnnnnnnnnnnnnnnnnnnnnnnnnnnnnnnnnnnnnnnnnnnnnnnnnnnnnnnnnnnnnnnnnnnnnnnnnnnnnnnnnnnnnnnnnnnnnnnnnnnnnnnnnnnnnnnnnnnnnnnnnnnnnnnnnnnnnnnnnnnnnnnnnnnnnnnnnnnnnnnnnnnnnnnnnnnnnnnnnnnnnnnnnnnnnnnnnnnnnnnnnnnnnnnnnnnnnnnnnnnnnnnnnnnnnnnnnnnnnnnnnnnnnnnnnnnnnnnnnnnnnnnnnnnnnnnnnnnnnnnnnnnnnnnnnnnnnnnnnnnnnnnnnnnnnnnnnnnnnnnnnnnnnnnnnnnnnnnnnnnnnnnnnnnnnnnnnnnnnnnnnnnnnnnnnnnnnnnnnnnnnnnnnnnnnnnnnnnnnnnnnnnnnnnnnnnnnnnnnnnnnnnnnnnnnnnnnnnnnnnnnnnnnnnnnnnnnnnnnnnnnnnnnnnnnnnnnnnnnnnnnnnnnnnnnnnnnnnnnnnnnnnnnnnnnnnnnnnnnnnnnnnnnnnnnnnnnnnnnnnnnnnnnnnnnnnnnnnnnnnnnnnnnnnnnnnnnnnnnnnnnnnnnnnnnnnnnnnnnnnnnnnnnnnnnnnnnnnnnnnnnnnnnnnnnnnnnnnnnnnnnnnnnnnnnnnnnnnnnnnnnnnnnnnnnnnnnnnnnnnnnnnnnnnnnnnnnnnnnnnnnnnnnnnnnnnnnnnnnnnnnnnnnnnnnnnnnnnnnnnnnnnnnnnnnnnnnnnnnnnnnnnnnnnnnnnnnnnnnnnnnnnnnnnnnnnnnnnnnnnnnnnnnnnnnnnnnnnnnnnnnnnnnnnnnnnnnnnnnnnnnnnnnnnnnnnnnnnnnnnnnnnnnnnnnnnnnnnnnnnnnnnnnnnnnnnnnnnnnnnnnnnnnnnnnnnnnnnnnnnnnnnnnnnnnnnnnnnnnnnnnnnnnnnnnnnnnnnnnnnnnnnnnnnnnnnnnnnnnnnnnnnnnnnnnnnnnnnnnnnnnnnnnnnnnnnnnnnnnnnnnnnnnnnnnnnnnnnnnnnnnnnnnnnnnnnnnnnnnnnnnnnnnnnnnnnnnnnnnnnnnnnnnnnnnnnnnnnnnnnnnnnnnnnnnnnnnnnnnnnnnnnnnnnnnnnnnnnnnnnnnnnnnnnnnnnnnnnnnnnnnnnnnnnnnnnnnnnnnnnnnnnnnnnnnnnnnnnnnnnnnnnnnnnnnnnnnnnnnnnnnnnnnnnnnnnnnnnnnnnnnnnnnnnnnnnnnnnnnnnnnnnnnnnnnnnnnnnnnnnnnnnnnnnnnnnnnnnnnnnnnnnnnnnnnnnnnnnnnnnnnnnnnnnnnnnnnnnnnnnnnnnnnnnnnnnnnnnnnnnnnnnnnnnnnnnnnnnnnnnnnnnnnnnnnnnnnnnnnnnnnnnnnnnnnnnnnnnnnnnnnnnnnnnnnnnnnnnnnnnnnnnnnnnnnnnnnnnnnnnnnnnnnnnnnnnnnnnnnnnnnnnnnnnnnnnnnnnnnnnnnnnnnnnnnnnnnnnnnnnnnnnnnnnnnnnnnnnnnnnnnnnnnnnnnnnnnnnnnnnnnnnnnnnnnnnnnnnnnnnnnnnnnnnnnnnnnnnnnnnnnnnnnnnnnnnnnnnnnnnnnnnnnnnnnnnnnnnnnnnnnnnnnnnnnnnnnnnnnnnnnnnnnnnnnnnnnnnnnnnnnnnnnnnnnnnnnnnnnnnnnnnnnnnnnnnnnnnnnnnnnnnnnnnnnnnnnnnnnnnnnnnnnnnnnnnnnnnnnnnnnnnnnnnnnnnnnnnnnnnnnnnnnnnnnnnnnnnnnnnnnnnnnnnnnnnnnnnnnnnnnnnnnnnnnnnnnnnnnnnnnnnnnnnnnnnnnnnnnnnnnnnnnnnnnnnnnnnnnnnnnnnnnnnnnnnnnnnnnnnnnnnnnnnnnnnnnnnnnnnnnnnnnnnnnnnnnnnnnnnnnnnnnnnnnnnnnnnnnnnnnnnnnnnnnnnnnnnnnnnnnnnnnnnnnnnnnnnnnnnnnnnnnnnnnnnnnnnnnnnnnnnnnnnnnnnnnnnnnnnnnnnnnnnnnnnnnnnnnnnnnnnnnnnnnnnnnnnnnnnnnnnnnnnnnnnnnnnnnnnnnnnnnnnnnnnnnnnnnnnnnnnnnnnnnnnnnnnnnnnnnnnnnnnnnnnnnnnnnnnnnnnnnnnnnnnnnnnnnnnnnnnnnnnnnnnnnnnnnnnnnnnnnnnnnnnnnnnnnnnnnnnnnnnnnnnnnnnnnnnnnnnnnnnnnnnnnnnnnnnnnnnnnnnnnnnnnnnnnnnnnnnnnnnnnnnnnnnnnnnnnnnnnnnnnnnnnnnnnnnnnnnnnnnnnnnnnnnnnnnnnnnnnnnnnnnnnnnnnnnnnnnnnnnnnnnnnnnnnnnnnnnnnnnnnnnnnnnnnnnnnnnnnnnnnnnnnnnnnnnnnnnnnnnnnnnnnnnnnnnnnnnnnnnnnnnnnnnnnnnnnnnnnnnnnnnnnnnnnnnnnnnnnnnnnnnnnnnnnnnnnnnnnnnnnnnnnnnnnnnnnnnnnnnnnnnnnnnnnnnnnnnnnnnnnnnnnnnnnnnnnnnnnnnnnnnnnnnnnnnnnnnnnnnnnnnnnnnnnnnnnnnnnnnnnnnnnnnnnnnnnnnnnnnnnnnnnnnnnnnnnnnnnnnnnnnnnnnnnnnnnnnnnnnnnnnnnnnnnnnnnnnnnnnnnnnnnnnnnnnnnnnnnnnnnnnnnnnnnnnnnnnnnnnnnnnnnnnnnnnnnnnnnnnnnnnnnnnnnnnnnnnnnnnnnnnnnnnnnnnnnnnnnnnnnnnnnnnnnnnnnnnnnnnnnnnnnnnnnnnnnnnnnnnnnnnnnnnnnnnnnnnnnnnnnnnnnnnnnnnnnnnnnnnnnnnnnnnnnnnnnnnnnnnnnnnnnnnnnnnnnnnnnnnnnnnnnnnnnnnnnnnnnnnnnnnnnnnnnnnnnnnnnnnnnnnnnnnnnnnnnnnnnnnnnnnnnnnnnnnnnnnnnnnnnnnnnnnnnnnnnnnnnnnnnnnnnnnnnnnnnnnnnnnnnnnnnnnnnnnnnnnnnnnnnnnnnnnnnnnnnnnnnnnnnnnnnnnnnnnnnnnnnnnnnnnnnnnnnnnnnnnnnnnnnnnnnnnnnnnnnnnnnnnnnnnnnnnnnnnnnnnnnnnnnnnnnnnnnnnnnnnnnnnnnnnnnnnnnnnnnnnnnnnnnnnnnnnnnnnnnnnnnnnnnnnnnnnnnnnnnnnnnnnnnnnnnnnnnnnnnnnnnnnnnnnnnnnnnnnnnnnnnnnnnnnnnnnnnnnnnnnnnnnnnnnnnnnnnnnnnnnnnnnnnnnnnnnnnnnnnnnnnnnnnnnnnnnnnnnnnnnnnnnnnnnnnnnnnnnnnnnnnnnnnnnnnnnnnnnnnnnnnnnnnnnnnnnnnnnnnnnnnnnnnnnnnnnnnnnnnnnnnnnnnnnnnnnnnnnnnnnnnnnnnnnnnnnnnnnnnnnnnnnnnnnnnnnnnnnnnnnnnnnnnnnnnnnnnnnnnnnnnnnnnnnnnnnnnnnnnnnnnnnnnnnnnnnnnnnnnnnnnnnnnnnnnnnnnnnnnnnnnnnnnnnnnnnnnnnnnnnnnnnnnnnnnnnnnnnnnnnnnnnnnnnnnnnnnnnnnnnnnnnnnnnnnnnnnnnnnnnnnnnnnnnnnnnnnnnnnnnnnnnnnnnnnnnnnnnnnnnnnnnnnnnnnnnnnnnnnnnnnnnnnnnnnnnnnnnnnnnnnnnnnnnnnnnnnnnnnnnnnnnnnnnnnnnnnnnnnnnnnnnnnnnnnnnnnnnnnnnnnnnnnnnnnnnnnnnnnnnnnnnnnnnnnnnnnnnnnnnnnnnnnnnnnnnnnnnnnnnnnnnnnnnnnnnnnnnnnnnnnnnnnnnnnnnnnnnnnnnnnnnnnnnnnnnnnnnnnnnnnnnnnnnnnnnnnnnnnnnnnnnnnnnnnnnnnnnnnnnnnnnnnnnnnnnnnnnnnnnnnnnnnnnnnnnnnnnnnnnnnnnnnnnnnnnnnnnnnnnnnnnnnnnnnnnnnnnnnnnnnnnnnnnnnnnnnnnnnnnnnnnnnnnnnnnnnnnnnnnnnnnnnnnnnnnnnnnnnnnnnnnnnnnnnnnnnnnnnnnnnnnnnnnnnnnnnnnnnnnnnnnnnnnnnnnnnnnnnnnnnnnnnnnnnnnnnnnnnnnnnnnnnnnnnnnnnnnnnnnnnnnnnnnnnnnnnnnnnnnnnnnnnnnnnnnnnnnnnnnnnnnnnnnnnnnnnnnnnnnnnnnnnnnnnnnnnnnnnnnnnnnnnnnnnnnnnnnnnnnnnnnnnnnnnnnnnnnnnnnnnnnnnnnnnnnnnnnnnnnnnnnnnnnnnnnnnnnnnnnnnnnnnnnnnnnnnnnnnnnnnnnnnnnnnnnnnnnnnnnnnnnnnnnnnnnnnnnnnnnnnnnnnnnnnnnnnnnnnnnnnnnnnnnnnnnnnnnnnnnnnnnnnnnnnnnnnnnnnnnnnnnnnnnnnnnnnnnnnnnnnnnnnnnnnnnnnnnnnnnnnnnnnnnnnnnnnnnnnnnnnnnnnnnnnnnnnnnnnnnnnnnnnnnnnnnnnnnnnnnnnnnnnnnnnnnnnnnnnnnnnnnnnnnnnnnnnnnnnnnnnnnnnnnnnnnnnnnnnnnnnnnnnnnnnnnnnnnnnnnnnnnnnnnnnnnnnnnnnnnnnnnnnnnnnnnnnnnnnnnnnnnnnnnnnnnnnnnnnnnnnnnnnnnnnnnnnnnnnnnnnnnnnnnnnnnnnnnnnnnnnnnnnnnnnnnnnnnnnnnnnnnnnnnnnnnnnnnnnnnnnnnnnnnnnnnnnnnnnnnnnnnnnnnnnnnnnnnnnnnnnnnnnnnnnnnnnnnnnnnnnnnnnnnnnnnnnnnnnnnnnnnnnnnnnnnnnnnnnnnnnnnnnnnnnnnnnnnnnnnnnnnnnnnnnnnnnnnnnnnnnnnnnnnnnnnnnnnnnnnnnnnnnnnnnnnnnnnnnnnnnnnnnnnnnnnnnnnnnnnnnnnnnnnnnnnnnnnnnnnnnnnnnnnnnnnnnnnnnnnnnnnnnnnnnnnnnnnnnnnnnnnnnnnnnnnnnnnnnnnnnnnnnnnnnnnnnnnnnnnnnnnnnnnnnnnnnnnnnnnnnnnnnnnnnnnnnnnnnnnnnnnnnnnnnnnnnnnnnnnnnnnnnnnnnnnnnnnnnnnnnnnnnnnnnnnnnnnnnnnnnnnnnnnnnnnnnnnnnnnnnnnnnnnnnnnnnnnnnnnnnnnnnnnnnnnnnnnnnnnnnnnnnnnnnnnnnnnnnnnnnnnnnnnnnnnnnnnnnnnnnnnnnnnnnnnnnnnnnnnnnnnnnnnnnnnnnnnnnnnnnnnnnnnnnnnnnnnnnnnnnnnnnnnnnnnnnnnnnnnnnnnnnnnnnnnnnnnnnnnnnnnnnnnnnnnnnnnnnnnnnnnnnnnnnnnnnnnnnnnnnnnnnnnnnnnnnnnnnnnnnnnnnnnnnnnnnnnnnnnnnnnnnnnnnnnnnnnnnnnnnnnnnnnnnnnnnnnnnnnnnnnnnnnnnnnnnnnnnnnnnnnnnnnnnnnnnnnnnnnnnnnnnnnnnnnnnnnnnnnnnnnnnnnnnnnnnnnnnnnnnnnnnnnnnnnnnnnnnnnnnnnnnnnnnnnnnnnnnnnnnnnnnnnnnnnnnnnnnnnnnnnnnnnnnnnnnnnnnnnnnnnnnnnnnnnnnnnnnnnnnnnnnnnnnnnnnnnnnnnnnnnnnnnnnnnnnnnnnnnnnnnnnnnnnnnnnnnnnnnnnnnnnnnnnnnnnnnnnnnnnnnnnnnnnnnnnnnnnnnnnnnnnnnnnnnnnnnnnnnnnnnnnnnnnnnnnnnnnnnnnnnnnnnnnnnnnnnnnnnnnnnnnnnnnnnnnnnnnnnnnnnnnnnnnnnnnnnnnnnnnnnnnnnnnnnnnnnnnnnnnnnnnnnnnnnnnnnnnnnnnnnnnnnnnnnnnnnnnnnnnnnnnnnnnnnnnnnnnnnnnnnnnnnnnnnnnnnnnnnnnnnnnnnnnnnnnnnnnnnnnnnnnnnnnnnnnnnnnnnnnnnnnnnnnnnnnnnnnnnnnnnnnnnnnnnnnnnnnnnnnnnnnnnnnnnnnnnnnnnnnnnnnnnnnnnnnnnnnnnnnnnnnnnnnnnnnnnnnnnnnnnnnnnnnnnnnnnnnnnnnnnnnnnnnnnnnnnnnnnnnnnnnnnnnnnnnnnnnnnnnnnnnnnnnnnnnnnnnnnnnnnnnnnnnnnnnnnnnnnnnnnnnnnnnnnnnnnnnnnnnnnnnnnnnnnnnnnnnnnnnnnnnnnnnnnnnnnnnnnnnnnnnnnnnnnnnnnnnnnnnnnnnnnnnnnnnnnnnnnnnnnnnnnnnnnnnnnnnnnnnnnnnnnnnnnnnnnnnnnnnnnnnnnnnnnnnnnnnnnnnnnnnnnnnnnnnnnnnnnnnnnnnnnnnnnnnnnnnnnnnnnnnnnnnnnnnnnnnnnnnnnnnnnnnnnnnnnnnnnnnnnnnnnnnnnnnnnnnnnnnnnnnnnnnnnnnnnnnnnnnnnnnnnnnnnnnnnnnnnnnnnnnnnnnnnnnnnnnnnnnnnnnnnnnnnnnnnnnnnnnnnnnnnnnnnnnnnnnnnnnnnnnnnnnnnnnnnnnnnnnnnnnnnnnnnnnnnnnnnnnnnnnnnnnnnnnnnnnnnnnnnnnnnnnnnnnnnnnnnnnnnnnnnnnnnnnnnnnnnnnnnnnnnnnnnnnnnnnnnnnnnnnnnnnnnnnnnnnnnnnnnnnnnnnnnnnnnnnnnnnnnnnnnnnnnnnnnnnnnnnnnnnnnnnnnnnnnnnnnnnnnnnnnnnnnnnnnnnnnnnnnnnnnnnnnnnnnnnnnnnnnnnnnnnnnnnnnnnnnnnnnnnnnnnnnnnnnnnnnnnnnnnnnnnnnnnnnnnnnnnnnnnnnnnnnnnnnnnnnnnnnnnnnnnnnnnnnnnnnnnnnnnnnnnnnnnnnnnnnnnnnnnnnnnnnnnnnnnnnnnnnnnnnnnnnnnnnnnnnnnnnnnnnnnnnnnnnnnnnnnnnnnnnnnnnnnnnnnnnnnnnnnnnnnnnnnnnnnnnnnnnnnnnnnnnnnnnnnnnnnnnnnnnnnnnnnnnnnnnnnnnnnnnnnnnnnnnnnnnnnnnnnnnnnnnnnnnnnnnnnnnnnnnnnnnnnnnnnnnnnnnnnnnnnnnnnnnnnnnnnnnnnnnnnnnnnnnnnnnnnnnnnnnnnnnnnnnnnnnnnnnnnnnnnnnnnnnnnnnnnnnnnnnnnnnnnnnnnnnnnnnnnnnnnnnnnnnnnnnnnnnnnnnnnnnnnnnnnnnnnnnnnnnnnnnnnnnnnnnnnnnnnnnnnnnnnnnnnnnnnnnnnnnnnnnnnnnnnnnnnnnnnnnnnnnnnnnnnnnnnnnnnnnnnnnnnnnnnnnnnnnnnnnnnnnnnnnnnnnnnnnnnnnnnnnnnnnnnnnnnnnnnnnnnnnnnnnnnnnnnnnnnnnnnnnnnnnnnnnnnnnnnnnnnnnnnnnnnnnnnnnnnnnnnnnnnnnnnnnnnnnnnnnnnnnnnnnnnnnnnnnnnnnnnnnnnnnnnnnnnnnnnnnnnnnnnnnnnnnnnnnnnnnnnnnnnnnnnnnnnnnnnnnnnnnnnnnnnnnnnnnnnnnnnnnnnnnnnnnnnnnnnnnnnnnnnnnnnnnnnnnnnnnnnnnnnnnnnnnnnnnnnnnnnnnnnnnnnnnnnnnnnnnnnnnnnnnnnnnnnnnnnnnnnnnnnnnnnnnnnnnnnnnnnnnnnnnnnnnnnnnnnnnnnnnnnnnnnnnnnnnnnnnnnnnnnnnnnnnnnnnnnnnnnnnnnnnnnnnnnnnnnnnnnnnnnnnnnnnnnnnnnnnnnnnnnnnnnnnnnnnnnnnnnnnnnnnnnnnnnnnnnnnnnnnnnnnnnnnnnnnnnnnnnnnnnnnnnnnnnnnnnnnnnnnnnnnnnnnnnnnnnnnnnnnnnnnnnnnnnnnnnnnnnnnnnnnnnnnnnnnnnnnnnnnnnnnnnnnnnnnnnnnnnnnnnnnnnnnnnnnnnnnnnnnnnnnnnnnnnnnnnnnnnnnnnnnnnnnnnnnnnnnnnnnnnnnnnnnnnnnnnnnnnnnnnnnnnnnnnnnnnnnnnnnnnnnnnnnnnnnnnnnnnnnnnnnnnnnnnnnnnnnnnnnnnnnnnnnnnnnnnnnnnnnnnnnnnnnnnnnnnnnnnnnnnnnnnnnnnnnnnnnnnnnnnnnnnnnnnnnnnnnnnnnnnnnnnnnnnnnnnnnnnnnnnnnnnnnnnnnnnnnnnnnnnnnnnnnnnnnnnnnnnnnnnnnnnnnnnnnnnnnnnnnnnnnnnnnnnnnnnnnnnnnnnnnnnnnnnnnnnnnnnnnnnnnnnnnnnnnnnnnnnnnnnnnnnnnnnnnnnnnnnnnnnnnnnnnnnnnnnnnnnnnnnnnnnnnnnnnnnnnnnnnnnnnnnnnnnnnnnnnnnnnnnnnnnnnnnnnnnnnnnnnnnnnnnnnnnnnnnnnnnnnnnnnnnnnnnnnnnnnnnnnnnnnnnnnnnnnnnnnnnnnnnnnnnnnnnnnnnnnnnnnnnnnnnnnnnnnnnnnnnnnnnnnnnnnnnnnnnnnnnnnnnnnnnnnnnnnnnnnnnnnnnnnnnnnnnnnnnnnnnnnnnnnnnnnnnnnnnnnnnnnnnnnnnnnnnnnnnnnnnnnnnnnnnnnnnnnnnnnnnnnnnnnnnnnnnnnnnnnnnnnnnnnnnnnnnnnnnnnnnnnnnnnnnnnnnnnnnnnnnnnnnnnnnnnnnnnnnnnnnnnnnnnnnnnnnnnnnnnnnnnnnnnnnnnnnnnnnnnnnnnnnnnnnnnnnnnnnnnnnnnnnnnnnnnnnnnnnnnnnnnnnnnnnnnnnnnnnnnnnnnnnnnnnnnnnnnnnnnnnnnnnnnnnnnnnnnnnnnnnnnnnnnnnnnnnnnnnnnnnnnnnnnnnnnnnnnnnnnnnnnnnnnnnnnnnnnnnnnnnnnnnnnnnnnnnnnnnnnnnnnnnnnnnnnnnnnnnnnnnnnnnnnnnnnnnnnnnnnnnnnnnnnnnnnnnnnnnnnnnnnnnnnnnnnnnnnnnnnnnnnnnnnnnnnnnnnnnnnnnnnnnnnnnnnnnnnnnnnnnnnnnnnnnnnnnnnnnnnnnnnnnnnnnnnnnnnnnnnnnnnnnnnnnnnnnnnnnnnnnnnnnnnnnnnnnnnnnnnnnnnnnnnnnnnnnnnnnnnnnnnnnnnnnnnnnnnnnnnnnnnnnnnnnnnnnnnnnnnnnnnnnnnnnnnnnnnnnnnnnnnnnnnnnnnnnnnnnnnnnnnnnnnnnnnnnnnnnnnnnnnnnnnnnnnnnnnnnnnnnnnnnnnnnnnnnnnnnnnnnnnnnnnnnnnnnnnnnnnnnnnnnnnnnnnnnnnnnnnnnnnnnnnnnnnnnnnnnnnnnnnnnnnnnnnnnnnnnnnnnnnnnnnnnnnnnnnnnnnnnnnnnnnnnnnnnnnnnnnnnnnnnnnnnnnnnnnnnnnnnnnnnnnnnnnnnnnnnnnnnnnnnnnnnnnnnnnnnnnnnnnnnnnnnnnnnnnnnnnnnnnnnnnnnnnnnnnnnnnnnnnnnnnnnnnnnnnnnnnnnnnnnnnnnnnnnnnnnnnnnnnnnnnnnnnnnnnnnnnnnnnnnnnnnnnnnnnnnnnnnnnnnnnnnnnnnnnnnnnnnnnnnnnnnnnnnnnnnnnnnnnnnnnnnnnnnnnnnnnnnnnnnnnnnnnnnnnnnnnnnnnnnnnnnnnnnnnnnnnnnnnnnnnnnnnnnnnnnnnnnnnnnnnnnnnnnnnnnnnnnnnnnnnnnnnnnnnnnnnnnnnnnnnnnnnnnnnnnnnnnnnnnnnnnnnnnnnnnnnnnnnnnnnnnnnnnnnnnnnnnnnnnnnnnnnnnnnnnnnnnnnnnnnnnnnnnnnnnnnnnnnnnnnnnnnnnnnnnnnnnnnnnnnnnnnnnnnnnnnnnnnnnnnnnnnnnnnnnnnnnnnnnnnnnnnnnnnnnnnnnnnnnnnnnnnnnnnnnnnnnnnnnnnnnnnnnnnnnnnnnnnnnnnnnnnnnnnnnnnnnnnnnnnnnnnnnnnnnnnnnnnnnnnnnnnnnnnnnnnnnnnnnnnnnnnnnnnnnnnnnnnnnnnnnnnnnnnnnnnnnnnnnnnnnnnnnnnnnnnnnnnnnnnnnnnnnnnnnnnnnnnnnnnnnnnnnnnnnnnnnnnnnnnnnnnnnnnnnnnnnnnnnnnnnnnnnnnnnnnnnnnnnnnnnnnnnnnnnnnnnnnnnnnnnnnnnnnnnnnnnnnnnnnnnnnnnnnnnnnnnnnnnnnnnnnnnnnnnnnnnnnnnnnnnnnnnnnnnnnnnnnnnnnnnnnnnnnnnnnnnnnnnnnnnnnnnnnnnnnnnnnnnnnnnnnnnnnnnnnnnnnnnnnnnnnnnnnnnnnnnnnnnnnnnnnnnnnnnnnnnnnnnnnnnnnnnnnnnnnnnnnnnnnnnnnnnnnnnnnnnnnnnnnnnnnnnnnnnnnnnnnnnnnnnnnnnnnnnnnnnnnnnnnnnnnnnnnnnnnnnnnnnnnnnnnnnnnnnnnnnnnnnnnnnnnnnnnnnnnnnnnnnnnnnnnnnnnnnnnnnnnnnnnnnnnnnnnnnnnnnnnnnnnnnnnnnnnnnnnnnnnnnnnnnnnnnnnnnnnnnnnnnnnnnnnnnnnnnnnnnnnnnnnnnnnnnnnnnnnnnnnnnnnnnnnnnnnnnnnnnnnnnnnnnnnnnnnnnnnnnnnnnnnnnnnnnnnnnnnnnnnnnnnnnnnnnnnnnnnnnnnnnnnnnnnnnnnnnnnnnnnnnnnnnnnnnnnnnnnnnnnnnnnnnnnnnnnnnnnnnnnnnnnnnnnnnnnnnnnnnnnnnnnnnnnnnnnnnnnnnnnnnnnnnnnnnnnnnnnnnnnnnnnnnnnnnnnnnnnnnnnnnnnnnnnnnnnnnnnnnnnnnnnnnnnnnnnnnnnnnnnnnnnnnnnnnnnnnnnnnnnnnnnnnnnnnnnnnnnnnnnnnnnnnnnnnnnnnnnnnnnnnnnnnnnnnnnnnnnnnnnnnnnnnnnnnnnnnnnnnnnnnnnnnnnnnnnnnnnnnnnnnnnnnnnnnnnnnnnnnnnnnnnnnnnnnnnnnnnnnnnnnnnnnnnnnnnnnnnnnnnnnnnnnnnnnnnnnnnnnnnnnnnnnnnnnnnnnnnnnnnnnnnnnnnnnnnnnnnnnnnnnnnnnnnnnnnnnnnnnnnnnnnnnnnnnnnnnnnnnnnnnnnnnnnnnnnnnnnnnnnnnnnnnnnnnnnnnnnnnnnnnnnnnnnnnnnnnnnnnnnnnnnnnnnnnnnnnnnnnnnnnnnnnnnnnnnnnnnnnnnnnnnnnnnnnnnnnnnnnnnnnnnnnnnnnnnnnnnnnnnnnnnnnnnnnnnnnnnnnnnnnnnnnnnnnnnnnnnnnnnnnnnnnnnnnnnnnnnnnnnnnnnnnnnnnnnnnnnnnnnnnnnnnnnnnnnnnnnnnnnnnnnnnnnnnnnnnnnnnnnnnnnnnnnnnnnnnnnnnnnnnnnnnnnnnnnnnnnnnnnnnnnnnnnnnnnnnnnnnnnnnnnnnnnnnnnnnnnnnnnnnnnnnnnnnnnnnnnnnnnnnnnnnnnnnnnnnnnnnnnnnnnnnnnnnnnnnnnnnnnnnnnnnnnnnnnnnnnnnnnnnnnnnnnnnnnnnnnnnnnnnnnnnnnnnnnnnnnnnnnnnnnnnnnnnnnnnnnnnnnnnnnnnnnnnnnnnnnnnnnnnnnnnnnnnnnnnnnnnnnnnnnnnnnnnnnnnnnnnnnnnnnnnnnnnnnnnnnnnnnnnnnnnnnnnnnnnnnnnnnnnnnnnnnnnnnnnnnnnnnnnnnnnnnnnnnnnnnnnnnnnnnnnnnnnnnnnnnnnnnnnnnnnnnnnnnnnnnnnnnnnnnnnnnnnnnnnnnnnnnnnnnnnnnnnnnnnnnnnnnnnnnnnnnnnnnnnnnnnnnnnnnnnnnnnnnnnnnnnnnnnnnnnnnnnnnnnnnnnnnnnnnnnnnnnnnnnnnnnnnnnnnnnnnnnnnnnnnnnnnnnnnnnnnnnnnnnnnnnnnnnnnnnnnnnnnnnnnnnnnnnnnnnnnnnnnnnnnnnnnnnnnnnnnnnnnnnnnnnnnnnnnnnnnnnnnnnnnnnnnnnnnnnnnnnnnnnnnnnnnnnnnnnnnnnnnnnnnnnnnnnnnnnnnnnnnnnnnnnnnnnnnnnnnnnnnnnnnnnnnnnnnnnnnnnnnnnnnnnnnnnnnnnnnnnnnnnnnnnnnnnnnnnnnnnnnnnnnnnnnnnnnnnnnnnnnnnnnnnnnnnnnnnnnnnnnnnnnnnnnnnnnnnnnnnnnnnnnnnnnnnnnnnnnnnnnnnnnnnnnnnnnnnnnnnnnnnnnnnnnnnnnnnnnnnnnnnnnnnnnnnnnnnnnnnnnnnnnnnnnnnnnnnnnnnnnnnnnnnnnnnnnnnnnnnnnnnnnnnnnnnnnnnnnnnnnnnnnnnnnnnnnnnnnnnnnnnnnnnnnnnnnnnnnnnnnnnnnnnnnnnnnnnnnnnnnnnnnnnnnnnnnnnnnnnnnnnnnnnnnnnnnnnnnnnnnnnnnnnnnnnnnnnnnnnnnnnnnnnnnnnnnnnnnnnnnnnnnnnnnnnnnnnnnnnnnnnnnnnnnnnnnnnnnnnnnnnnnnnnnnnnnnnnnnnnnnnnnnnnnnnnnnnnnnnnnnnnnnnnnnnnnnnnnnnnnnnnnnnnnnnnnnnnnnnnnnnnnnnnnnnnnnnnnnnnnnnnnnnnnnnnnnnnnnnnnnnnnnnnnnnnnnnnnnnnnnnnnnnnnnnnnnnnnnnnnnnnnnnnnnnnnnnnnnnnnnnnnnnnnnnnnnnnnnnnnnnnnnnnnnnnnnnnnnnnnnnnnnnnnnnnnnnnnnnnnnnnnnnnnnnnnnnnnnnnnnnnnnnnnnnnnnnnnnnnnnnnnnnnnnnnnnnnnnnnnnnnnnnnnnnnnnnnnnnnnnnnnnnnnnnnnnnnnnnnnnnnnnnnnnnnnnnnnnnnnnnnnnnnnnnnnnnnnnnnnnnnnnnnnnnnnnnnnnnnnnnnnnnnnnnnnnnnnnnnnnnnnnnnnnnnnnnnnnnnnnnnnnnnnnnnnnnnnnnnnnnnnnnnnnnnnnnnnnnnnnnnnnnnnnnnnnnnnnnnnnnnnnnnnnnnnnnnnnnnnnnnnnnnnnnnnnnnnnnnnnnnnnnnnnnnnnnnnnnnnnnnnnnnnnnnnnnnnnnnnnnnnnnnnnnnnnnnnnnnnnnnnnnnnnnnnnnnnnnnnnnnnnnnnnnnnnnnnnnnnnnnnnnnnnnnnnnnnnnnnnnnnnnnnnnnnnnnnnnnnnnnnnnnnnnnnnnnnnnnnnnnnnnnnnnnnnnnnnnnnnnnnnnnnnnnnnnnnnnnnnnnnnnnnnnnnnnnnnnnnnnnnnnnnnnnnnnnnnnnnnnnnnnnnnnnnnnnnnnnnnnnnnnnnnnnnnnnnnnnnnnnnnnnnnnnnnnnnnnnnnnnnnnnnnnnnnnnnnnnnnnnnnnnnnnnnnnnnnnnnnnnnnnnnnnnnnnnnnnnnnnnnnnnnnnnnnnnnnnnnnnnnnnnnnnnnnnnnnnnnnnnnnnnnnnnnnnnnnnnnnnnnnnnnnnnnnnnnnnnnnnnnnnnnnnnnnnnnnnnnnnnnnnnnnnnnnnnnnnnnnnnnnnnnnnnnnnnnnnnnnnnnnnnnnnnnnnnnnnnnnnnnnnnnnnnnnnnnnnnnnnnnnnnnnnnnnnnnnnnnnnnnnnnnnnnnnnnnnnnnnnnnnnnnnnnnnnnnnnnnnnnnnnnnnnnnnnnnnnnnnnnnnnnnnnnnnnnnnnnnnnnnnnnnnnnnnnnnnnnnnnnnnnnnnnnnnnnnnnnnnnnnnnnnnnnnnnnnnnnnnnnnnnnnnnnnnnnnnnnnnnnnnnnnnnnnnnnnnnnnnnnnnnnnnnnnnnnnnnnnnnnnnnnnnnnnnnnnnnnnnnnnnnnnnnnnnnnnnnnnnnnnnnnnnnnnnnnnnnnnnnnnnnnnnnnnnnnnnnnnnnnnnnnnnnnnnnnnnnnnnnnnnnnnnnnnnnnnnnnnnnnnnnnnnnnnnnnnnnnnnnnnnnnnnnnnnnnnnnnnnnnnnnnnnnnnnnnnnnnnnnnnnnnnnnnnnnnnnnnnnnnnnnnnnnnnnnnnnnnnnnnnnnnnnnnnnnnnnnnnnnnnnnnnnnnnnnnnnnnnnnnnnnnnnnnnnnnnnnnnnnnnnnnnnnnnnnnnnnnnnnnnnnnnnnnnnnnnnnnnnnnnnnnnnnnnnnnnnnnnnnnnnnnnnnnnnnnnnnnnnnnnnnnnnnnnnnnnnnnnnnnnnnnnnnnnnnnnnnnnnnnnnnnnnnnnnnnnnnnnnnnnnnnnnnnnnnnnnnnnnnnnnnnnnnnnnnnnnnnnnnnnnnnnnnnnnnnnnnnnnnnnnnnnnnnnnnnnnnnnnnnnnnnnnnnnnnnnnnnnnnnnnnnnnnnnnnnnnnnnnnnnnnnnnnnnnnnnnnnnnnnnnnnnnnnnnnnnnnnnnnnnnnnnnnnnnnnnnnnnnnnnnnnnnnnnnnnnnnnnnnnnnnnnnnnnnnnnnnnnnnnnnnnnnnnnnnnnnnnnnnnnnnnnnnnnnnnnnnnnnnnnnnnnnnnnnnnnnnnnnnnnnnnnnnnnnnnnnnnnnnnnnnnnnnnnnnnnnnnnnnnnnnnnnnnnnnnnnnnnnnnnnnnnnnnnnnnnnnnnnnnnnnnnnnnnnnnnnnnnnnnnnnnnnnnnnnnnnnnnnnnnnnnnnnnnnnnnnnnnnnnnnnnnnnnnnnnnnnnnnnnnnnnnnnnnnnnnnnnnnnnnnnnnnnnnnnnnnnnnnnnnnnnnnnnnnnnnnnnnnnnnnnnnnnnnnnnnnnnnnnnnnnnnnnnnnnnnnnnnnnnnnnnnnnnnnnnnnnnnnnnnnnnnnnnnnnnnnnnnnnnnnnnnnnnnnnnnnnnnnnnnnnnnnnnnnnnnnnnnnnnnnnnnnnnnnnnnnnnnnnnnnnnnnnnnnnnnnnnnnnnnnnnnnnnnnnnnnnnnnnnnnnnnnnnnnnnnnnnnnnnnnnnnnnnnnnnnnnnnnnnnnnnnnnnnnnnnnnnnnnnnnnnnnnnnnnnnnnnnnnnnnnnnnnnnnnnnnnnnnnnnnnnnnnnnnnnnnnnnnnnnnnnnnnnnnnnnnnnnnnnnnnnnnnnnnnnnnnnnnnnnnnnnnnnnnnnnnnnnnnnnnnnnnnnnnnnnnnnnnnnnnnnnnnnnnnnnnnnnnnnnnnnnnnnnnnnnnnnnnnnnnnnnnnnnnnnnnnnnnnnnnnnnnnnnnnnnnnnnnnnnnnnnnnnnnnnnnnnnnnnnnnnnnnnnnnnnnnnnnnnnnnnnnnnnnnnnnnnnnnnnnnnnnnnnnnnnnnnnnnnnnnnnnnnnnnnnnnnnnnnnnnnnnnnnnnnnnnnnnnnnnnnnnnnnnnnnnnnnnnnnnnnnnnnnnnnnnnnnnnnnnnnnnnnnnnnnnnnnnnnnnnnnnnnnnnnnnnnnnnnnnnnnnnnnnnnnnnnnnnnnnnnnnnnnnnnnnnnnnnnnnnnnnnnnnnnnnnnnnnnnnnnnnnnnnnnnnnnnnnnnnnnnnnnnnnnnnnnnnnnnnnnnnnnnnnnnnnnnnnnnnnnnnnnnnnnnnnnnnnnnnnnnnnnnnnnnnnnnnnnnnnnnnnnnnnnnnnnnnnnnnnnnnnnnnnnnnnnnnnnnnnnnnnnnnnnnnnnnnnnnnnnnnnnnnnnnnnnnnnnnnnnnnnnnnnnnnnnnnnnnnnnnnnnnnnnnnnnnnnnnnnnnnnnnnnnnnnnnnnnnnnnnnnnnnnnnnnnnnnnnnnnnnnnnnnnnnnnnnnnnnnnnnnnnnnnnnnnnnnnnnnnnnnnnnnnnnnnnnnnnnnnnnnnnnnnnnnnnnnnnnnnnnnnnnnnnnnnnnnnnnnnnnnnnnnnnnnnnnnnnnnnnnnnnnnnnnnnnnnnnnnnnnnnnnnnnnnnnnnnnnnnnnnnnnnnnnnnnnnnnnnnnnnnnnnnnnnnnnnnnnnnnnnnnnnnnnnnnnnnnnnnnnnnnnnnnnnnnnnnnnnnnnnnnnnnnnnnnnnnnnnnnnnnnnnnnnnnnnnnnnnnnnnnnnnnnnnnnnnnnnnnnnnnnnnnnnnnnnnnnnnnnnnnnnnnnnnnnnnnnnnnnnnnnnnnnnnnnnnnnnnnnnnnnnnnnnnnnnnnnnnnnnnnnnnnnnnnnnnnnnnnnnnnnnnnnnnnnnnnnnnnnnnnnnnnnnnnnnnnnnnnnnnnnnnnnnnnnnnnnnnnnnnnnnnnnnnnnnnnnnnnnnnnnnnnnnnnnnnnnnnnnnnnnnnnnnnnnnnnnnnnnnnnnnnnnnnnnnnnnnnnnnnnnnnnnnnnnnnnnnnnnnnnnnnnnnnnnnnnnnnnnnnnnnnnnnnnnnnnnnnnnnnnnnnnnnnnnnnnnnnnnnnnnnnnnnnnnnnnnnnnnnnnnnnnnnnnnnnnnnnnnnnnnnnnnnnnnnnnnnnnnnnnnnnnnnnnnnnnnnnnnnnnnnnnnnnnnnnnnnnnnnnnnnnnnnnnnnnnnnnnnnnnnnnnnnnnnnnnnnnnnnnnnnnnnnnnnnnnnnnnnnnnnnnnnnnnnnnnnnnnnnnnnnnnnnnnnnnnnnnnnnnnnnnnnnnnnnnnnnnnnnnnnnnnnnnnnnnnnnnnnnnnnnnnnnnnnnnnnnnnnnnnnnnnnnnnnnnnnnnnnnnnnnnnnnnnnnnnnnnnnnnnnnnnnnnnnnnnnnnnnnnnnnnnnnnnnnnnnnnnnnnnnnnnnnnnnnnnnnnnnnnnnnnnnnnnnnnnnnnnnnnnnnnnnnnnnnnnnnnnnnnnnnnnnnnnnnnnnnnnnnnnnnnnnnnnnnnnnnnnnnnnnnnnnnnnnnnnnnnnnnnnnnnnnnnnnnnnnnnnnnnnnnnnnnnnnnnnnnnnnnnnnnnnnnnnnnnnnnnnnnnnnnnnnnnnnnnnnnnnnnnnnnnnnnnnnnnnnnnnnnnnnnnnnnnnnnnnnnnnnnnnnnnnnnnnnnnnnnnnnnnnnnnnnnnnnnnnnnnnnnnnnnnnnnnnnnnnnnnnnnnnnnnnnnnnnnnnnnnnnnnnnnnnnnnnnnnnnnnnnnnnnnnnnnnnnnnnnnnnnnnnnnnnnnnnnnnnnnnnnnnnnnnnnnnnnnnnnnnnnnnnnnnnnnnnnnnnnnnnnnnnnnnnnnnnnnnnnnnnnnnnnnnnnnnnnnnnnnnnnnnnnnnnnnnnnnnnnnnnnnnnnnnnnnnnnnnnnnnnnnnnnnnnnnnnnnnnnnnnnnnnnnnnnnnnnnnnnnnnnnnnnnnnnnnnnnnnnnnnnnnnnnnnnnnnnnnnnnnnnnnnnnnnnnnnnnnnnnnnnnnnnnnnnnnnnnnnnnnnnnnnnnnnnnnnnnnnnnnnnnnnnnnnnnnnnnnnnnnnnnnnnnnnnnnnnnnnnnnnnnnnnnnnnnnnnnnnnnnnnnnnnnnnnnnnnnnnnnnnnnnnnnnnnnnnnnnnnnnnnnnnnnnnnnnnnnnnnnnnnnnnnnnnnnnnnnnnnnnnnnnnnnnnnnnnnnnnnnnnnnnnnnnnnnnnnnnnnnnnnnnnnnnnnnnnnnnnnnnnnnnnnnnnnnnnnnnnnnnnnnnnnnnnnnnnnnnnnnnnnnnnnnnnnnnnnnnnnnnnnnnnnnnnnnnnnnnnnnnnnnnnnnnnnnnnnnnnnnnnnnnnnnnnnnnnnnnnnnnnnnnnnnnnnnnnnnnnnnnnnnnnnnnnnnnnnnnnnnnnnnnnnnnnnnnnnnnnnnnnnnnnnnnnnnnnnnnnnnnnnnnnnnnnnnnnnnnnnnnnnnnnnnnnnnnnnnnnnnnnnnnnnnnnnnnnnnnnnnnnnnnnnnnnnnnnnnnnnnnnnnnnnnnnnnnnnnnnnnnnnnnnnnnnnnnnnnnnnnnnnnnnnnnnnnnnnnnnnnnnnnnnnnnnnnnnnnnnnnnnnnnnnnnnnnnnnnnnnnnnnnnnnnnnnnnnnnnnnnnnnnnnnnnnnnnnnnnnnnnnnnnnnnnnnnnnnnnnnnnnnnnnnnnnnnnnnnnnnnnnnnnnnnnnnnnnnnnnnnnnnnnnnnnnnnnnnnnnnnnnnnnnnnnnnnnnnnnnnnnnnnnnnnnnnnnnnnnnnnnnnnnnnnnnnnnnnnnnnnnnnnnnnnnnnnnnnnnnnnnnnnnnnnnnnnnnnnnnnnnnnnnnnnnnnnnnnnnnnnnnnnnnnnnnnnnnnnnnnnnnnnnnnnnnnnnnnnnnnnnnnnnnnnnnnnnnnnnnnnnnnnnnnnnnnnnnnnnnnnnnnnnnnnnnnnnnnnnnnnnnnnnnnnnnnnnnnnnnnnnnnnnnnnnnnnnnnnnnnnnnnnnnnnnnnnnnnnnnnnnnnnnnnnnnnnnnnnnnnnnnnnnnnnnnnnnnnnnnnnnnnnnnnnnnnnnnnnnnnnnnnnnnnnnnnnnnnnnnnnnnnnnnnnnnnnnnnnnnnnnnnnnnnnnnnnnnnnnnnnnnnnnnnnnnnnnnnnnnnnnnnnnnnnnnnnnnnnnnnnnnnnnnnnnnnnnnnnnnnnnnnnnnnnnnnnnnnnnnnnnnnnnnnnnnnnnnnnnnnnnnnnnnnnnnnnnnnnnnnnnnnnnnnnnnnnnnnnnnnnnnnnnnnnnnnnnnnnnnnnnnnnnnnnnnnnnnnnnnnnnnnnnnnnnnnnnnnnnnnnnnnnnnnnnnnnnnnnnnnnnnnnnnnnnnnnnnnnnnnnnnnnnnnnnnnnnnnnnnnnnnnnnnnnnnnnnnnnnnnnnnnnnnnnnnnnnnnnnnnnnnnnnnnnnnnnnnnnnnnnnnnnnnnnnnnnnnnnnnnnnnnnnnnnnnnnnnnnnnnnnnnnnnnnnnnnnnnnnnnnnnnnnnnnnnnnnnnnnnnnnnnnnnnnnnnnnnnnnnnnnnnnnnnnnnnnnnnnnnnnnnnnnnnnnnnnnnnnnnnnnnnnnnnnnnnnnnnnnnnnnnnnnnnnnnnnnnnnnnnnnnnnnnnnnnnnnnnnnnnnnnnnnnnnnnnnnnnnnnnnnnnnnnnnnnnnnnnnnnnnnnnnnnnnnnnnnnnnnnnnnnnnnnnnnnnnnnnnnnnnnnnnnnnnnnnnnnnnnnnnnnnnnnnnnnnnnnnnnnnnnnnnnnnnnnnnnnnnnnnnnnnnnnnnnnnnnnnnnnnnnnnnnnnnnnnnnnnnnnnnnnnnnnnnnnnnnnnnnnnnnnnnnnnnnnnnnnnnnnnnnnnnnnnnnnnnnnnnnnnnnnnnnnnnnnnnnnnnnnnnnnnnnnnnnnnnnnnnnnnnnnnnnnnnnnnnnnnnnnnnnnnnnnnnnnnnnnnnnnnnnnnnnnnnnnnnnnnnnnnnnnnnnnnnnnnnnnnnnnnnnnnnnnnnnnnnnnnnnnnnnnnnnnnnnnnnnnnnnnnnnnnnnnnnnnnnnnnnnnnnnnnnnnnnnnnnnnnnnnnnnnnnnnnnnnnnnnnnnnnnnnnnnnnnnnnnnnnnnnnnnnnnnnnnnnnnnnnnnnnnnnnnnnnnnnnnnnnnnnnnnnnnnnnnnnnnnnnnnnnnnnnnnnnnnnnnnnnnnnnnnnnnnnnnnnnnnnnnnnnnnnnnnnnnnnnnnnnnnnnnnnnnnnnnnnnnnnnnnnnnnnnnnnnnnnnnnnnnnnnnnnnnnnnnnnnnnnnnnnnnnnnnnnnnnnnnnnnnnnnnnnnnnnnnnnnnnnnnnnnnnnnnnnnnnnnnnnnnnnnnnnnnnnnnnnnnnnnnnnnnnnnnnnnnnnnnnnnnnnnnnnnnnnnnnnnnnnnnnnnnnnnnnnnnnnnnnnnnnnnnnnnnnnnnnnnnnnnnnnnnnnnnnnnnnnnnnnnnnnnnnnnnnnnnnnnnnnnnnnnnnnnnnnnnnnnnnnnnnnnnnnnnnnnnnnnnnnnnnnnnnnnnnnnnnnnnnnnnnnnnnnnnnnnnnnnnnnnnnnnnnnnnnnnnnnnnnnnnnnnnnnnnnnnnnnnnnnnnnnnnnnnnnnnnnnnnnnnnnnnnnnnnnnnnnnnnnnnnnnnnnnnnnnnnnnnnnnnnnnnnnnnnnnnnnnnnnnnnnnnnnnnnnnnnnnnnnnnnnnnnnnnnnnnnnnnnnnnnnnnnnnnnnnnnnnnnnnnnnnnnnnnnnnnnnnnnnnnnnnnnnnnnnnnnnnnnnnnnnnnnnnnnnnnnnnnnnnnnnnnnnnnnnnnnnnnnnnnnnnnnnnnnnnnnnnnnnnnnnnnnnnnnnnnnnnnnnnnnnnnnnnnnnnnnnnnnnnnnnnnnnnnnnnnnnnnnnnnnnnnnnnnnnnnnnnnnnnnnnnnnnnnnnnnnnnnnnnnnnnnnnnnnnnnnnnnnnnnnnnnnnnnnnnnnnnnnnnnnnnnnnnnnnnnnnnnnnnnnnnnnnnnnnnnnnnnnnnnnnnnnnnnnnnnnnnnnnnnnnnnnnnnnnnnnnnnnnnnnnnnnnnnnnnnnnnnnnnnnnnnnnnnnnnnnnnnnnnnnnnnnnnnnnnnnnnnnnnnnnnnnnnnnnnnnnnnnnnnnnnnnnnnnnnnnnnnnnnnnnnnnnnnnnnnnnnnnnnnnnnnnnnnnnnnnnnnnnnnnnnnnnnnnnnnnnnnnnnnnnnnnnnnnnnnnnnnnnnnnnnnnnnnnnnnnnnnnnnnnnnnnnnnnnnnnnnnnnnnnnnnnnnnnnnnnnnnnnnnnnnnnnnnnnnnnnnnnnnnnnnnnnnnnnnnnnnnnnnnnnnnnnnnnnnnnnnnnnnnnnnnnnnnnnnnnnnnnnnnnnnnnnnnnnnnnnnnnnnnnnnnnnnnnnnnnnnnnnnnnnnnnnnnnnnnnnnnnnnnnnnnnnnnnnnnnnnnnnnnnnnnnnnnnnnnnnnnnnnnnnnnnnnnnnnnnnnnnnnnnnnnnnnnnnnnnnnnnnnnnnnnnnnnnnnnnnnnnnnnnnnnnnnnnnnnnnnnnnnnnnnnnnnnnnnnnnnnnnnnnnnnnnnnnnnnnnnnnnnnnnnnnnnnnnnnnnnnnnnnnnnnnnnnnnnnnnnnnnnnnnnnnnnnnnnnnnnnnnnnnnnnnnnnnnnnnnnnnnnnnnnnnnnnnnnnnnnnnnnnnnnnnnnnnnnnnnnnnnnnnnnnnnnnnnnnnnnnnnnnnnnnnnnnnnnnnnnnnnnnnnnnnnnnnnnnnnnnnnnnnnnnnnnnnnnnnnnnnnnnnnnnnnnnnnnnnnnnnnnnnnnnnnnnnnnnnnnnnnnnnnnnnnnnnnnnnnnnnnnnnnnnnnnnnnnnnnnnnnnnnnnnnnnnnnnnnnnnnnnnnnnnnnnnnnnnnnnnnnnnnnnnnnnnnnnnnnnnnnnnnnnnnnnnnnnnnnnnnnnnnnnnnnnnnnnnnnnnnnnnnnnnnnnnnnnnnnnnnnnnnnnnnnnnnnnnnnnnnnnnnnnnnnnnnnnnnnnnnnnnnnnnnnnnnnnnnnnnnnnnnnnnnnnnnnnnnnnnnnnnnnnnnnnnnnnnnnnnnnnnnnnnnnnnnnnnnnnnnnnnnnnnnnnnnnnnnnnnnnnnnnnnnnnnnnnnnnnnnnnnnnnnnnnnnnnnnnnnnnnnnnnnnnnnnnnnnnnnnnnnnnnnnnnnnnnnnnnnnnnnnnnnnnnnnnnnnnnnnnnnnnnnnnnnnnnnnnnnnnnnnnnnnnnnnnnnnnnnnnnnnnnnnnnnnnnnnnnnnnnnnnnnnnnnnnnnnnnnnnnnnnnnnnnnnnnnnnnnnnnnnnnnnnnnnnnnnnnnnnnnnnnnnnnnnnnnnnnnnnnnnnnnnnnnnnnnnnnnnnnnnnnnnnnnnnnnnnnnnnnnnnnnnnnnnnnnnnnnnnnnnnnnnnnnnnnnnnnnnnnnnnnnnnnnnnnnnnnnnnnnnnnnnnnnnnnnnnnnnnnnnnnnnnnnnnnnnnnnnnnnnnnnnnnnnnnnnnnnnnnnnnnnnnnnnnnnnnnnnnnnnnnnnnnnnnnnnnnnnnnnnnnnnnnnnnnnnnnnnnnnnnnnnnnnnnnnnnnnnnnnnnnnnnnnnnnnnnnnnnnnnnnnnnnnnnnnnnnnnnnnnnnnnnnnnnnnnnnnnnnnnnnnnnnnnnnnnnnnnnnnnnnnnnnnnnnnnnnnnnnnnnnnnnnnnnnnnnnnnnnnnnnnnnnnnnnnnnnnnnnnnnnnnnnnnnnnnnnnnnnnnnnnnnnnnnnnnnnnnnnnnnnnnnnnnnnnnnnnnnnnnnnnnnnnnnnnnnnnnnnnnnnnnnnnnnnnnnnnnnnnnnnnnnnnnnnnnnnnnnnnnnnnnnnnnnnnnnnnnnnnnnnnnnnnnnnnnnnnnnnnnnnnnnnnnnnnnnnnnnnnnnnnnnnnnnnnnnnnnnnnnnnnnnnnnnnnnnnnnnnnnnnnnnnnnnnnnnnnnnnnnnnnnnnnnnnnnnnnnnnnnnnnnnnnnnnnnnnnnnnnnnnnnnnnnnnnnnnnnnnnnnnnnnnnnnnnnnnnnnnnnnnnnnnnnnnnnnnnnnnnnnnnnnnnnnnnnnnnnnnnnnnnnnnnnnnnnnnnnnnnnnnnnnnnnnnnnnnnnnnnnnnnnnnnnnnnnnnnnnnnnnnnnnnnnnnnnnnnnnnnnnnnnnnnnnnnnnnnnnnnnnnnnnnnnnnnnnnnnnnnnnnnnnnnnnnnnnnnnnnnnnnnnnnnnnnnnnnnnnnnnnnnnnnnnnnnnnnnnnnnnnnnnnnnnnnnnnnnnnnnnnnnnnnnnnnnnnnnnnnnnnnnnnnnnnnnnnnnnnnnnnnnnnnnnnnnnnnnnnnnnnnnnnnnnnnnnnnnnnnnnnnnnnnnnnnnnnnnnnnnnnnnnnnnnnnnnnnnnnnnnnnnnnnnnnnnnnnnnnnnnnnnnnnnnnnnnnnnnnnnnnnnnnnnnnnnnnnnnnnnnnnnnnnnnnnnnnnnnnnnnnnnnnnnnnnnnnnnnnnnnnnnnnnnnnnnnnnnnnnnnnnnnnnnnnnnnnnnnnnnnnnnnnnnnnnnnnnnnnnnnnnnnnnnnnnnnnnnnnnnnnnnnnnnnnnnnnnnnnnnnnnnnnnnnnnnnnnnnnnnnnnnnnnnnnnnnnnnnnnnnnnnnnnnnnnnnnnnnnnnnnnnnnnnnnnnnnnnnnnnnnnnnnnnnnnnnnnnnnnnnnnnnnnnnnnnnnnnnnnnnnnnnnnnnnnnnnnnnnnnnnnnnnnnnnnnnnnnnnnnnnnnnnnnnnnnnnnnnnnnnnnnnnnnnnnnnnnnnnnnnnnnnnnnnnnnnnnnnnnnnnnnnnnnnnnnnnnnnnnnnnnnnnnnnnnnnnnnnnnnnnnnnnnnnnnnnnnnnnnnnnnnnnnnnnnnnnnnnnnnnnnnnnnnnnnnnnnnnnnnnnnnnnnnnnnnnnnnnnnnnnnnnnnnnnnnnnnnnnnnnnnnnnnnnnnnnnnnnnnnnnnnnnnnnnnnnnnnnnnnnnnnnnnnnnnnnnnnnnnnnnnnnnnnnnnnnnnnnnnnnnnnnnnnnnnnnnnnnnnnnnnnnnnnnnnnnnnnnnnnnnnnnnnnnnnnnnnnnnnnnnnnnnnnnnnnnnnnnnnnnnnnnnnnnnnnnnnnnnnnnnnnnnnnnnnnnnnnnnnnnnnnnnnnnnnnnnnnnnnnnnnnnnnnnnnnnnnnnnnnnnnnnnnnnnnnnnnnnnnnnnnnnnnnnnnnnnnnnnnnnnnnnnnnnnnnnnnnnnnnnnnnnnnnnnnnnnnnnnnnnnnnnnnnnnnnnnnnnnnnnnnnnnnnnnnnnnnnnnnnnnnnnnnnnnnnnnnnnnnnnnnnnnnnnnnnnnnnnnnnnnnnnnnnnnnnnnnnnnnnnnnnnnnnnnnnnnnnnnnnnnnnnnnnnnnnnnnnnnnnnnnnnnnnnnnnnnnnnnnnnnnnnnnnnnnnnnnnnnnnnnnnnnnnnnnnnnnnnnnnnnnnnnnnnnnnnnnnnnnnnnnnnnnnnnnnnnnnnnnnnnnnnnnnnnnnnnnnnnnnnnnnnnnnnnnnnnnnnnnnnnnnnnnnnnnnnnnnnnnnnnnnnnnnnnnnnnnnnnnnnnnnnnnnnnnnnnnnnnnnnnnnnnnnnnnnnnnnnnnnnnnnnnnnnnnnnnnnnnnnnnnnnnnnnnnnnnnnnnnnnnnnnnnnnnnnnnnnnnnnnnnnnnnnnnnnnnnnnnnnnnnnnnnnnnnnnnnnnnnnnnnnnnnnnnnnnnnnnnnnnnnnnnnnnnnnnnnnnnnnnnnnnnnnnnnnnnnnnnnnnnnnnnnnnnnnnnnnnnnnnnnnnnnnnnnnnnnnnnnnnnnnnnnnnnnnnnnnnnnnnnnnnnnnnnnnnnnnnnnnnnnnnnnnnnnnnnnnnnnnnnnnnnnnnnnnnnnnnnnnnnnnnnnnnnnnnnnnnnnnnnnnnnnnnnnnnnnnnnnnnnnnnnnnnnnnnnnnnnnnnnnnnnnnnnnnnnnnnnnnnnnnnnnnnnnnnnnnnnnnnnnnnnnnnnnnnnnnnnnnnnnnnnnnnnnnnnnnnnnnnnnnnnnnnnnnnnnnnnnnnnnnnnnnnnnnnnnnnnnnnnnnnnnnnnnnnnnnnnnnnnnnnnnnnnnnnnnnnnnnnnnnnnnnnnnnnnnnnnnnnnnnnnnnnnnnnnnnnnnnnnnnnnnnnnnnnnnnnnnnnnnnnnnnnnnnnnnnnnnnnnnnnnnnnnnnnnnnnnnnnnnnnnnnnnnnnnnnnnnnnnnnnnnnnnnnnnnnnnnnnnnnnnnnnnnnnnnnnnnnnnnnnnnnnnnnnnnnnnnnnnnnnnnnnnnnnnnnnnnnnnnnnnnnnnnnnnnnnnnnnnnnnnnnnnnnnnnnnnnnnnnnnnnnnnnnnnnnnnnnnnnnnnnnnnnnnnnnnnnnnnnnnnnnnnnnnnnnnnnnnnnnnnnnnnnnnnnnnnnnnnnnnnnnnnnnnnnnnnnnnnnnnnnnnnnnnnnnnnnnnnnnnnnnnnnnnnnnnnnnnnnnnnnnnnnnnnnnnnnnnnnnnnnnnnnnnnnnnnnnnnnnnnnnnnnnnnnnnnnnnnnnnnnnnnnnnnnnnnnnnnnnnnnnnnnnnnnnnnnnnnnnnnnnnnnnnnnnnnnnnnnnnnnnnnnnnnnnnnnnnnnnnnnnnnnnnnnnnnnnnnnnnnnnnnnnnnnnnnnnnnnnnnnnnnnnnnnnnnnnnnnnnnnnnnnnnnnnnnnnnnnnnnnnnnnnnnnnnnnnnnnnnnnnnnnnnnnnnnnnnnnnnnnnnnnnnnnnnnnnnnnnnnnnnnnnnnnnnnnnnnnnnnnnnnnnnnnnnnnnnnnnnnnnnnnnnnnnnnnnnnnnnnnnnnnnnnnnnnnnnnnnnnnnnnnnnnnnnnnnnnnnnnnnnnnnnnnnnnnnnnnnnnnnnnnnnnnnnnnnnnnnnnnnnnnnnnnnnnnnnnnnnnnnnnnnnnnnnnnnnnnnnnnnnnnnnnnnnnnnnnnnnnnnnnnnnnnnnnnnnnnnnnnnnnnnnnnnnnnnnnnnnnnnnnnnnnnnnnnnnnnnnnnnnnnnnnnnnnnnnnnnnnnnnnnnnnnnnnnnnnnnnnnnnnnnnnnnnnnnnnnnnnnnnnnnnnnnnnnnnnnnnnnnnnnnnnnnnnnnnnnnnnnnnnnnnnnnnnnnnnnnnnnnnnnnnnnnnnnnnnnnnnnnnnnnnnnnnnnnnnnnnnnnnnnnnnnnnnnnnnnnnnnnnnnnnnnnnnnnnnnnnnnnnnnnnnnnnnnnnnnnnnnnnnnnnnnnnnnnnnnnnnnnnnnnnnnnnnnnnnnnnnnnnnnnnnnnnnnnnnnnnnnnnnnnnnnnnnnnnnnnnnnnnnnnnnnnnnnnnnnnnnnnnnnnnnnnnnnnnnnnnnnnnnnnnnnnnnnnnnnnnnnnnnnnnnnnnnnnnnnnnnnnnnnnnnnnnnnnnnnnnnnnnnnnnnnnnnnnnnnnnnnnnnnnnnnnnnnnnnnnnnnnnnnnnnnnnnnnnnnnnnnnnnnnnnnnnnnnnnnnnnnnnnnnnnnnnnnnnnnnnnnnnnnnnnnnnnnnnnnnnnnnnnnnnnnnnnnnnnnnnnnnnnnnnnnnnnnnnnnnnnnnnnnnnnnnnnnnnnnnnnnnnnnnnnnnnnnnnnnnnnnnnnnnnnnnnnnnnnnnnnnnnnnnnnnnnnnnnnnnnnnnnnnnnnnnnnnnnnnnnnnnnnnnnnnnnnnnnnnnnnnnnnnnnnnnnnnnnnnnnnnnnnnnnnnnnnnnnnnnnnnnnnnnnnnnnnnnnnnnnnnnnnnnnnnnnnnnnnnnnnnnnnnnnnnnnnnnnnnnnnnnnnnnnnnnnnnnnnnnnnnnnnnnnnnnnnnnnnnnnnnnnnnnnnnnnnnnnnnnnnnnnnnnnnnnnnnnnnnnnnnnnnnnnnnnnnnnnnnnnnnnnnnnnnnnnnnnnnnnnnnnnnnnnnnnnnnnnnnnnnnnnnnnnnnnnnnnnnnnnnnnnnnnnnnnnnnnnnnnnnnnnnnnnnnnnnnnnnnnnnnnnnnnnnnnnnnnnnnnnnnnnnnnnnnnnnnnnnnnnnnnnnnnnnnnnnnnnnnnnnnnnnnnnnnnnnnnnnnnnnnnnnnnnnnnnnnnnnnnnnnnnnnnnnnnnnnnnnnnnnnnnnnnnnnnnnnnnnnnnnnnnnnnnnnnnnnnnnnnnnnnnnnnnnnnnnnnnnnnnnnnnnnnnnnnnnnnnnnnnnnnnnnnnnnnnnnnnnnnnnnnnnnnnnnnnnnnnnnnnnnnnnnnnnnnnnnnnnnnnnnnnnnnnnnnnnnnnnnnnnnnnnnnnnnnnnnnnnnnnnnnnnnnnnnnnnnnnnnnnnnnnnnnnnnnnnnnnnnnnnnnnnnnnnnnnnnnnnnnnnnnnnnnnnnnnnnnnnnnnnnnnnnnnnnnnnnnnnnnnnnnnnnnnnnnnnnnnnnnnnnnnnnnnnnnnnnnnnnnnnnnnnnnnnnnnnnnnnnnnnnnnnnnnnnnnnnnnnnnnnnnnnnnnnnnnnnnnnnnnnnnnnnnnnnnnnnnnnnnnnnnnnnnnnnnnnnnnnnnnnnnnnnnnnnnnnnnnnnnnnnnnnnnnnnnnnnnnnnnnnnnnnnnnnnnnnnnnnnnnnnnnnnnnnnnnnnnnnnnnnnnnnnnnnnnnnnnnnnnnnnnnnnnnnnnnnnnnnnnnnnnnnnnnnnnnnnnnnnnnnnnnnnnnnnnnnnnnnnnnnnnnnnnnnnnnnnnnnnnnnnnnnnnnnnnnnnnnnnnnnnnnnnnnnnnnnnnnnnnnnnnnnnnnnnnnnnnnnnnnnnnnnnnnnnnnnnnnnnnnnnnnnnnnnnnnnnnnnnnnnnnnnnnnnnnnnnnnnnnnnnnnnnnnnnnnnnnnnnnnnnnnnnnnnnnnnnnnnnnnnnnnnnnnnnnnnnnnnnnnnnnnnnnnnnnnnnnnnnnnnnnnnnnnnnnnnnnnnnnnnnnnnnnnnnnnnnnnnnnnnnnnnnnnnnnnnnnnnnnnnnnnnnnnnnnnnnnnnnnnnnnnnnnnnnnnnnnnnnnnnnnnnnnnnnnnnnnnnnnnnnnnnnnnnnnnnnnnnnnnnnnnnnnnnnnnnnnnnnnnnnnnnnnnnnnnnnnnnnnnnnnnnnnnnnnnnnnnnnnnnnnnnnnnnnnnnnnnnnnnnnnnnnnnnnnnnnnnnnnnnnnnnnnnnnnnnnnnnnnnnnnnnnnnnnnnnnnnnnnnnnnnnnnnnnnnnnnnnnnnnnnnnnnnnnnnnnnnnnnnnnnnnnnnnnnnnnnnnnnnnnnnnnnnnnnnnnnnnnnnnnnnnnnnnnnnnnnnnnnnnnnnnnnnnnnnnnnnnnnnnnnnnnnnnnnnnnnnnnnnnnnnnnnnnnnnnnnnnnnnnnnnnnnnnnnnnnnnnnnnnnnnnnnnnnnnnnnnnnnnnnnnnnnnnnnnnnnnnnnnnnnnnnnnnnnnnnnnnnnnnnnnnnnnnnnnnnnnnnnnnnnnnnnnnnnnnnnnnnnnnnnnnnnnnnnnnnnnnnnnnnnnnnnnnnnnnnnnnnnnnnnnnnnnnnnnnnnnnnnnnnnnnnnnnnnnnnnnnnnnnnnnnnnnnnnnnnnnnnnnnnnnnnnnnnnnnnnnnnnnnnnnnnnnnnnnnnnnnnnnnnnnnnnnnnnnnnnnnnnnnnnnnnnnnnnnnnnnnnnnnnnnnnnnnnnnnnnnnnnnnnnnnnnnnnnnnnnnnnnnnnnnnnnnnnnnnnnnnnnnnnnnnnnnnnnnnnnnnnnnnnnnnnnnnnnnnnnnnnnnnnnnnnnnnnnnnnnnnnnnnnnnnnnnnnnnnnnnnnnnnnnnnnnnnnnnnnnnnnnnnnnnnnnnnnnnnnnnnnnnnnnnnnnnnnnnnnnnnnnnnnnnnnnnnnnnnnnnnnnnnnnnnnnnnnnnnnnnnnnnnnnnnnnnnnnnnnnnnnnnnnnnnnnnnnnnnnnnnnnnnnnnnnnnnnnnnnnnnnnnnnnnnnnnnnnnnnnnnnnnnnnnnnnnnnnnnnnnnnnnnnnnnnnnnnnnnnnnnnnnnnnnnnnnnnnnnnnnnnnnnnnnnnnnnnnnnnnnnnnnnnnnnnnnnnnnnnnnnnnnnnnnnnnnnnnnnnnnnnnnnnnnnnnnnnnnnnnnnnnnnnnnnnnnnnnnnnnnnnnnnnnnnnnnnnnnnnnnnnnnnnnnnnnnnnnnnnnnnnnnnnnnnnnnnnnnnnnnnnnnnnnnnnnnnnnnnnnnnnnnnnnnnnnnnnnnnnnnnnnnnnnnnnnnnnnnnnnnnnnnnnnnnnnnnnnnnnnnnnnnnnnnnnnnnnnnnnnnnnnnnnnnnnnnnnnnnnnnnnnnnnnnnnnnnnnnnnnnnnnnnnnnnnnnnnnnnnnnnnnnnnnnnnnnnnnnnnnnnnnnnnnnnnnnnnnnnnnnnnnnnnnnnnnnnnnnnnnnnnnnnnnnnnnnnnnnnnnnnnnnnnnnnnnnnnnnnnnnnnnnnnnnnnnnnnnnnnnnnnnnnnnnnnnnnnnnnnnnnnnnnnnnnnnnnnnnnnnnnnnnnnnnnnnnnnnnnnnnnnnnnnnnnnnnnnnnnnnnnnnnnnnnnnnnnnnnnnnnnnnnnnnnnnnnnnnnnnnnnnnnnnnnnnnnnnnnnnnnnnnnnnnnnnnnnnnnnnnnnnnnnnnnnnnnnnnnnnnnnnnnnnnnnnnnnnnnnnnnnnnnnnnnnnnnnnnnnnnnnnnnnnnnnnnnnnnnnnnnnnnnnnnnnnnnnnnnnnnnnnnnnnnnnnnnnnnnnnnnnnnnnnnnnnnnnnnnnnnnnnnnnnnnnnnnnnnnnnnnnnnnnnnnnnnnnnnnnnnnnnnnnnnnnnnnnnnnnnnnnnnnnnnnnnnnnnnnnnnnnnnnnnnnnnnnnnnnnnnnnnnnnnnnnnnnnnnnnnnnnnnnnnnnnnnnnnnnnnnnnnnnnnnnnnnnnnnnnnnnnnnnnnnnnnnnnnnnnnnnnnnnnnnnnnnnnnnnnnnnnnnnnnnnnnnnnnnnnnnnnnnnnnnnnnnnnnnnnnnnnnnnnnnnnnnnnnnnnnnnnnnnnnnnnnnnnnnnnnnnnnnnnnnnnnnnnnnnnnnnnnnnnnnnnnnnnnnnnnnnnnnnnnnnnnnnnnnnnnnnnnnnnnnnnnnnnnnnnnnnnnnnnnnnnnnnnnnnnnnnnnnnnnnnnnnnnnnnnnnnnnnnnnnnnnnnnnnnnnnnnnnnnnnnnnnnnnnnnnnnnnnnnnnnnnnnnnnnnnnnnnnnnnnnnnnnnnnnnnnnnnnnnnnnnnnnnnnnnnnnnnnnnnnnnnnnnnnnnnnnnnnnnnnnnnnnnnnnnnnnnnnnnnnnnnnnnnnnnnnnnnnnnnnnnnnnnnnnnnnnnnnnnnnnnnnnnnnnnnnnnnnnnnnnnnnnnnnnnnnnnnnnnnnnnnnnnnnnnnnnnnnnnnnnnnnnnnnnnnnnnnnnnnnnnnnnnnnnnnnnnnnnnnnnnnnnnnnnnnnnnnnnnnnnnnnnnnnnnnnnnnnnnnnnnnnnnnnnnnnnnnnnnnnnnnnnnnnnnnnnnnnnnnnnnnnnnnnnnnnnnnnnnnnnnnnnnnnnnnnnnnnnnnnnnnnnnnnnnnnnnnnnnnnnnnnnnnnnnnnnnnnnnnnnnnnnnnnnnnnnnnnnnnnnnnnnnnnnnnnnnnnnnnnnnnnnnnnnnnnnnnnnnnnnnnnnnnnnnnnnnnnnnnnnnnnnnnnnnnnnnnnnnnnnnnnnnnnnnnnnnnnnnnnnnnnnnnnnnnnnnnnnnnnnnnnnnnnnnnnnnnnnnnnnnnnnnnnnnnnnnnnnnnnnnnnnnnnnnnnnnnnnnnnnnnnnnnnnnnnnnnnnnnnnnnnnnnnnnnnnnnnnnnnnnnnnnnnnnnnnnnnnnnnnnnnnnnnnnnnnnnnnnnnnnnnnnnnnnnnnnnnnnnnnnnnnnnnnnnnnnnnnnnnnnnnnnnnnnnnnnnnnnnnnnnnnnnnnnnnnnnnnnnnnnnnnnnnnnnnnnnnnnnnnnnnnnnnnnnnnnnnnnnnnnnnnnnnnnnnnnnnnnnnnnnnnnnnnnnnnnnnnnnnnnnnnnnnnnnnnnnnnnnnnnnnnnnnnnnnnnnnnnnnnnnnnnnnnnnnnnnnnnnnnnnnnnnnnnnnnnnnnnnnnnnnnnnnnnnnnnnnnnnnnnnnnnnnnnnnnnnnnnnnnnnnnnnnnnnnnnnnnnnnnnnnnnnnnnnnnnnnnnnnnnnnnnnnnnnnnnnnnnnnnnnnnnnnnnnnnnnnnnnnnnnnnnnnnnnnnnnnnnnnnnnnnnnnnnnnnnnnnnnnnnnnnnnnnnnnnnnnnnnnnnnnnnnnnnnnnnnnnnnnnnnnnnnnnnnnnnnnnnnnnnnnnnnnnnnnnnnnnnnnnnnnnnnnnnnnnnnnnnnnnnnnnnnnnnnnnnnnnnnnnnnnnnnnnnnnnnnnnnnnnnnnnnnnnnnnnnnnnnnnnnnnnnnnnnnnnnnnnnnnnnnnnnnnnnnnnnnnnnnnnnnnnnnnnnnnnnnnnnnnnnnnnnnnnnnnnnnnnnnnnnnnnnnnnnnnnnnnnnnnnnnnnnnnnnnnnnnnnnnnnnnnnnnnnnnnnnnnnnnnnnnnnnnnnnnnnnnnnnnnnnnnnnnnnnnnnnnnnnnnnnnnnnnnnnnnnnnnnnnnnnnnnnnnnnnnnnnnnnnnnnnnnnnnnnnnnnnnnnnnnnnnnnnnnnnnnnnnnnnnnnnnnnnnnnnnnnnnnnnnnnnnnnnnnnnnnnnnnnnnnnnnnnnnnnnnnnnnnnnnnnnnnnnnnnnnnnnnnnnnnnnnnnnnnnnnnnnnnnnnnnnnnnnnnnnnnnnnnnnnnnnnnnnnnnnnnnnnnnnnnnnnnnnnnnnnnnnnnnnnnnnnnnnnnnnnnnnnnnnnnnnnnnnnnnnnnnnnnnnnnnnnnnnnnnnnnnnnnnnnnnnnnnnnnnnnnnnnnnnnnnnnnnnnnnnnnnnnnnnnnnnnnnnnnnnnnnnnnnnnnnnnnnnnnnnnnnnnnnnnnnnnnnnnnnnnnnnnnnnnnnnnnnnnnnnnnnnnnnnnnnnnnnnnnnnnnnnnnnnnnnnnnnnnnnnnnnnnnnnnnnnnnnnnnnnnnnnnnnnnnnnnnnnnnnnnnnnnnnnnnnnnnnnnnnnnnnnnnnnnnnnnnnnnnnnnnnnnnnnnnnnnnnnnnnnnnnnnnnnnnnnnnnnnnnnnnnnnnnnnnnnnnnnnnnnnnnnnnnnnnnnnnnnnnnnnnnnnnnnnnnnnnnnnnnnnnnnnnnnnnnnnnnnnnnnnnnnnnnnnnnnnnnnnnnnnnnnnnnnnnnnnnnnnnnnnnnnnnnnnnnnnnnnnnnnnnnnnnnnnnnnnnnnnnnnnnnnnnnnnnnnnnnnnnnnnnnnnnnnnnnnnnnnnnnnnnnnnnnnnnnnnnnnnnnnnnnnnnnnnnnnnnnnnnnnnnnnnnnnnnnnnnnnnnnnnnnnnnnnnnnnnnnnnnnnnnnnnnnnnnnnnnnnnnnnnnnnnnnnnnnnnnnnnnnnnnnnnnnnnnnnnnnnnnnnnnnnnnnnnnnnnnnnnnnnnnnnnnnnnnnnnnnnnnnnnnnnnnnnnnnnnnnnnnnnnnnnnnnnnnnnnnnnnnnnnnnnnnnnnnnnnnnnnnnnnnnnnnnnnnnnnnnnnnnnnnnnnnnnnnnnnnnnnnnnnnnnnnnnnnnnnnnnnnnnnnnnnnnnnnnnnnnnnnnnnnnnnnnnnnnnnnnnnnnnnnnnnnnnnnnnnnnnnnnnnnnnnnnnnnnnnnnnnnnnnnnnnnnnnnnnnnnnnnnnnnnnnnnnnnnnnnnnnnnnnnnnnnnnnnnnnnnnnnnnnnnnnnnnnnnnnnnnnnnnnnnnnnnnnnnnnnnnnnnnnnnnnnnnnnnnnnnnnnnnnnnnnnnnnnnnnnnnnnnnnnnnnnnnnnnnnnnnnnnnnnnnnnnnnnnnnnnnnnnnnnnnnnnnnnnnnnnnnnnnnnnnnnnnnnnnnnnnnnnnnnnnnnnnnnnnnnnnnnnnnnnnnnnnnnnnnnnnnnnnnnnnnnnnnnnnnnnnnnnnnnnnnnnnnnnnnnnnnnnnnnnnnnnnnnnnnnnnnnnnnnnnnnnnnnnnnnnnnnnnnnnnnnnnnnnnnnnnnnnnnnnnnnnnnnnnnnnnnnnnnnnnnnnnnnnnnnnnnnnnnnnnnnnnnnnnnnnnnnnnnnnnnnnnnnnnnnnnnnnnnnnnnnnnnnnnnnnnnnnnnnnnnnnnnnnnnnnnnnnnnnnnnnnnnnnnnnnnnnnnnnnnnnnnnnnnnnnnnnnnnnnnnnnnnnnnnnnnnnnnnnnnnnnnnnnnnnnnnnnnnnnnnnnnnnnnnnnnnnnnnnnnnnnnnnnnnnnnnnnnnnnnnnnnnnnnnnnnnnnnnnnnnnnnnnnnnnnnnnnnnnnnnnnnnnnnnnnnnnnnnnnnnnnnnnnnnnnnnnnnnnnnnnnnnnnnnnnnnnnnnnnnnnnnnnnnnnnnnnnnnnnnnnnnnnnnnnnnnnnnnnnnnnnnnnnnnnnnnnnnnnnnnnnnnnnnnnnnnnnnnnnnnnnnnnnnnnnnnnnnnnnnnnnnnnnnnnnnnnnnnnnnnnnnnnnnnnnnnnnnnnnnnnnnnnnnnnnnnnnnnnnnnnnnnnnnnnnnnnnnnnnnnnnnnnnnnnnnnnnnnnnnnnnnnnnnnnnnnnnnnnnnnnnnnnnnnnnnnnnnnnnnnnnnnnnnnnnnnnnnnnnnnnnnnnnnnnnnnnnnnnnnnnnnnnnnnnnnnnnnnnnnnnnnnnnnnnnnnnnnnnnnnnnnnnnnnnnnnnnnnnnnnnnnnnnnnnnnnnnnnnnnnnnnnnnnnnnnnnnnnnnnnnnnnnnnnnnnnnnnnnnnnnnnnnnnnnnnnnnnnnnnnnnnnnnnnnnnnnnnnnnnnnnnnnnnnnnnnnnnnnnnnnnnnnnnnnnnnnnnnnnnnnnnnnnnnnnnnnnnnnnnnnnnnnnnnnnnnnnnnnnnnnnnnnnnnnnnnnnnnnnnnnnnnnnnnnnnnnnnnnnnnnnnnnnnnnnnnnnnnnnnnnnnnnnnnnnnnnnnnnnnnnnnnnnnnnnnnnnnnnnnnnnnnnnnnnnnnnnnnnnnnnnnnnnnnnnnnnnnnnnnnnnnnnnnnnnnnnnnnnnnnnnnnnnnnnnnnnnnnnnnnnnnnnnnnnnnnnnnnnnnnnnnnnnnnnnnnnnnnnnnnnnnnnnnnnnnnnnnnnnnnnnnnnnnnnnnnnnnnnnnnnnnnnnnnnnnnnnnnnnnnnnnnnnnnnnnnnnnnnnnnnnnnnnnnnnnnnnnnnnnnnnnnnnnnnnnnnnnnnnnnnnnnnnnnnnnnnnnnnnnnnnnnnnnnnnnnnnnnnnnnnnnnnnnnnnnnnnnnnnnnnnnnnnnnnnnnnnnnnnnnnnnnnnnnnnnnnnnnnnnnnnnnnnnnnnnnnnnnnnnnnnnnnnnnnnnnnnnnnnnnnnnnnnnnnnnnnnnnnnnnnnnnnnnnnnnnnnnnnnnnnnnnnnnnnnnnnnnnnnnnnnnnnnnnnnnnnnnnnnnnnnnnnnnnnnnnnnnnnnnnnnnnnnnnnnnnnnnnnnnnnnnnnnnnnnnnnnnnnnnnnnnnnnnnnnnnnnnnnnnnnnnnnnnnnnnnnnnnnnnnnnnnnnnnnnnnnnnnnnnnnnnnnnnnnnnnnnnnnnnnnnnnnnnnnnnnnnnnnnnnnnnnnnnnnnnnnnnnnnnnnnnnnnnnnnnnnnnnnnnnnnnnnnnnnnnnnnnnnnnnnnnnnnnnnnnnnnnnnnnnnnnnnnnnnnnnnnnnnnnnnnnnnnnnnnnnnnnnnnnnnnnnnnnnnnnnnnnnnnnnnnnnnnnnnnnnnnnnnnnnnnnnnnnnnnnnnnnnnnnnnnnnnnnnnnnnnnnnnnnnnnnnnnnnnnnnnnnnnnnnnnnnnnnnnnnnnnnnnnnnnnnnnnnnnnnnnnnnnnnnnnnnnnnnnnnnnnnnnnnnnnnnnnnnnnnnnnnnnnnnnnnnnnnnnnnnnnnnnnnnnnnnnnnnnnnnnnnnnnnnnnnnnnnnnnnnnnnnnnnnnnnnnnnnnnnnnnnnnnnnnnnnnnnnnnnnnnnnnnnnnnnnnnnnnnnnnnnnnnnnnnnnnnnnnnnnnnnnnnnnnnnnnnnnnnnnnnnnnnnnnnnnnnnnnnnnnnnnnnnnnnnnnnnnnnnnnnnnnnnnnnnnnnnnnnnnnnnnnnnnnnnnnnnnnnnnnnnnnnnnnnnnnnnnnnnnnnnnnnnnnnnnnnnnnnnnnnnnnnnnnnnnnnnnnnnnnnnnnnnnnnnnnnnnnnnnnnnnnnnnnnnnnnnnnnnnnnnnnnnnnnnnnnnnnnnnnnnnnnnnnnnnnnnnnnnnnnnnnnnnnnnnnnnnnnnnnnnnnnnnnnnnnnnnnnnnnnnnnnnnnnnnnnnnnnnnnnnnnnnnnnnnnnnnnnnnnnnnnnnnnnnnnnnnnnnnnnnnnnnnnnnnnnnnnnnnnnnnnnnnnnnnnnnnnnnnnnnnnnnnnnnnnnnnnnnnnnnnnnnnnnnnnnnnnnnnnnnnnnnnnnnnnnnnnnnnnnnnnnnnnnnnnnnnnnnnnnnnnnnnnnnnnnnnnnnnnnnnnnnnnnnnnnnnnnnnnnnnnnnnnnnnnnnnnnnnnnnnnnnnnnnnnnnnnnnnnnnnnnnnnnnnnnnnnnnnnnnnnnnnnnnnnnnnnnnnnnnnnnnnnnnnnnnnnnnnnnnnnnnnnnnnnnnnnnnnnnnnnnnnnnnnnnnnnnnnnnnnnnnnnnnnnnnnnnnnnnnnnnnnnnnnnnnnnnnnnnnnnnnnnnnnnnnnnnnnnnnnnnnnnnnnnnnnnnnnnnnnnnnnnnnnnnnnnnnnnnnnnnnnnnnnnnnnnnnnnnnnnnnnnnnnnnnnnnnnnnnnnnnnnnnnnnnnnnnnnnnnnnnnnnnnnnnnnnnnnnnnnnnnnnnnnnnnnnnnnnnnnnnnnnnnnnnnnnnnnnnnnnnnnnnnnnnnnnnnnnnnnnnnnnnnnnnnnnnnnnnnnnnnnnnnnnnnnnnnnnnnnnnnnnnnnnnnnnnnnnnnnnnnnnnnnnnnnnnnnnnnnnnnnnnnnnnnnnnnnnnnnnnnnnnnnnnnnnnnnnnnnnnnnnnnnnnnnnnnnnnnnnnnnnnnnnnnnnnnnnnnnnnnnnnnnnnnnnnnnnnnnnnnnnnnnnnnnnnnnnnnnnnnnnnnnnnnnnnnnnnnnnnnnnnnnnnnnnnnnnnnnnnnnnnnnnnnnnnnnnnnnnnnnnnnnnnnnnnnnnnnnnnnnnnnnnnnnnnnnnnnnnnnnnnnnnnnnnnnnnnnnnnnnnnnnnnnnnnnnnnnnnnnnnnnnnnnnnnnnnnnnnnnnnnnnnnnnnnnnnnnnnnnnnnnnnnnnnnnnnnnnnnnnnnnnnnnnnnnnnnnnnnnnnnnnnnnnnnnnnnnnnnnnnnnnnnnnnnnnnnnnnnnnnnnnnnnnnnnnnnnnnnnnnnnnnnnnnnnnnnnnnnnnnnnnnnnnnnnnnnnnnnnnnnnnnnnnnnnnnnnnnnnnnnnnnnnnnnnnnnnnnnnnnnnnnnnnnnnnnnnnnnnnnnnnnnnnnnnnnnnnnnnnnnnnnnnnnnnnnnnnnnnnnnnnnnnnnnnnnnnnnnnnnnnnnnnnnnnnnnnnnnnnnnnnnnnnnnnnnnnnnnnnnnnnnnnnnnnnnnnnnnnnnnnnnnnnnnnnnnnnnnnnnnnnnnnnnnnnnnnnnnnnnnnnnnnnnnnnnnnnnnnnnnnnnnnnnnnnnnnnnnnnnnnnnnnnnnnnnnnnnnnnnnnnnnnnnnnnnnnnnnnnnnnnnnnnnnnnnnnnnnnnnnnnnnnnnnnnnnnnnnnnnnnnnnnnnnnnnnnnnnnnnnnnnnnnnnnnnnnnnnnnnnnnnnnnnnnnnnnnnnnnnnnnnnnnnnnnnnnnnnnnnnnnnnnnnnnnnnnnnnnnnnnnnnnnnnnnnnnnnnnnnnnnnnnnnnnnnnnnnnnnnnnnnnnnnnnnnnnnnnnnnnnnnnnnnnnnnnnnnnnnnnnnnnnnnnnnnnnnnnnnnnnnnnnnnnnnnnnnnnnnnnnnnnnnnnnnnnnnnnnnnnnnnnnnnnnnnnnnnnnnnnnnnnnnnnnnnnnnnnnnnnnnnnnnnnnnnnnnnnnnnnnnnnnnnnnnnnnnnnnnnnnnnnnnnnnnnnnnnnnnnnnnnnnnnnnnnnnnnnnnnnnnnnnnnnnnnnnnnnnnnnnnnnnnnnnnnnnnnnnnnnnnnnnnnnnnnnnnnnnnnnnnnnnnnnnnnnnnnnnnnnnnnnnnnnnnnnnnnnnnnnnnnnnnnnnnnnnnnnnnnnnnnnnnnnnnnnnnnnnnnnnnnnnnnnnnnnnnnnnnnnnnnnnnnnnnnnnnnnnnnnnnnnnnnnnnnnnnnnnnnnnnnnnnnnnnnnnnnnnnnnnnnnnnnnnnnnnnnnnnnnnnnnnnnnnnnnnnnnnnnnnnnnnnnnnnnnnnnnnnnnnnnnnnnnnnnnnnnnnnnnnnnnnnnnnnnnnnnnnnnnnnnnnnnnnnnnnnnnnnnnnnnnnnnnnnnnnnnnnnnnnnnnnnnnnnnnnnnnnnnnnnnnnnnnnnnnnnnnnnnnnnnnnnnnnnnnnnnnnnnnnnnnnnnnnnnnnnnnnnnnnnnnnnnnnnnnnnnnnnnnnnnnnnnnnnnnnnnnnnnnnnnnnnnnnnnnnnnnnnnnnnnnnnnnnnnnnnnnnnnnnnnnnnnnnnnnnnnnnnnnnnnnnnnnnnnnnnnnnnnnnnnnnnnnnnnnnnnnnnnnnnnnnnnnnnnnnnnnnnnnnnnnnnnnnnnnnnnnnnnnnnnnnnnnnnnnnnnnnnnnnnnnnnnnnnnnnnnnnnnnnnnnnnnnnnnnnnnnnnnnnnnnnnnnnnnnnnnnnnnnnnnnnnnnnnnnnnnnnnnnnnnnnnnnnnnnnnnnnnnnnnnnnnnnnnnnnnnnnnnnnnnnnnnnnnnnnnnnnnnnnnnnnnnnnnnnnnnnnnnnnnnnnnnnnnnnnnnnnnnnnnnnnnnnnnnnnnnnnnnnnnnnnnnnnnnnnnnnnnnnnnnnnnnnnnnnnnnnnnnnnnnnnnnnnnnnnnnnnnnnnnnnnnnnnnnnnnnnnnnnnnnnnnnnnnnnnnnnnnnnnnnnnnnnnnnnnnnnnnnnnnnnnnnnnnnnnnnnnnnnnnnnnnnnnnnnnnnnnnnnnnnnnnnnnnnnnnnnnnnnnnnnnnnnnnnnnnnnnnnnnnnnnnnnnnnnnnnnnnnnnnnnnnnnnnnnnnnnnnnnnnnnnnnnnnnnnnnnnnnnnnnnnnnnnnnnnnnnnnnnnnnnnnnnnnnnnnnnnnnnnnnnnnnnnnnnnnnnnnnnnnnnnnnnnnnnnnnnnnnnnnnnnnnnnnnnnnnnnnnnnnnnnnnnnnnnnnnnnnnnnnnnnnnnnnnnnnnnnnnnnnnnnnnnnnnnnnnnnnnnnnnnnnnnnnnnnnnnnnnnnnnnnnnnnnnnnnnnnnnnnnnnnnnnnnnnnnnnnnnnnnnnnnnnnnnnnnnnnnnnnnnnnnnnnnnnnnnnnnnnnnnnnnnnnnnnnnnnnnnnnnnnnnnnnnnnnnnnnnnnnnnnnnnnnnnnnnnnnnnnnnnnnnnnnnnnnnnnnnnnnnnnnnnnnnnnnnnnnnnnnnnnnnnnnnnnnnnnnnnnnnnnnnnnnnnnnnnnnnnnnnnnnnnnnnnnnnnnnnnnnnnnnnnnnnnnnnnnnnnnnnnnnnnnnnnnnnnnnnnnnnnnnnnnnnnnnnnnnnnnnnnnnnnnnnnnnnnnnnnnnnnnnnnnnnnnnnnnnnnnnnnnnnnnnnnnnnnnnnnnnnnnnnnnnnnnnnnnnnnnnnnnnnnnnnnnnnnnnnnnnnnnnnnnnnnnnnnnnnnnnnnnnnnnnnnnnnnnnnnnnnnnnnnnnnnnnnnnnnnnnnnnnnnnnnnnnnnnnnnnnnnnnnnnnnnnnnnnnnnnnnnnnnnnnnnnnnnnnnnnnnnnnnnnnnnnnnnnnnnnnnnnnnnnnnnnnnnnnnnnnnnnnnnnnnnnnnnnnnnnnnnnnnnnnnnnnnnnnnnnnnnnnnnnnnnnnnnnnnnnnnnnnnnnnnnnnnnnnnnnnnnnnnnnnnnnnnnnnnnnnnnnnnnnnnnnnnnnnnnnnnnnnnnnnnnnnnnnnnnnnnnnnnnnnnnnnnnnnnnnnnnnnnnnnnnnnnnnnnnnnnnnnnnnnnnnnnnnnnnnnnnnnnnnnnnnnnnnnnnnnnnnnnnnnnnnnnnnnnnnnnnnnnnnnnnnnnnnnnnnnnnnnnnnnnnnnnnnnnnnnnnnnnnnnnnnnnnnnnnnnnnnnnnnnnnnnnnnnnnnnnnnnnnnnnnnnnnnnnnnnnnnnnnnnnnnnnnnnnnnnnnnnnnnnnnnnnnnnnnnnnnnnnnnnnnnnnnnnnnnnnnnnnnnnnnnnnnnnnnnnnnnnnnnnnnnnnnnnnnnnnnnnnnnnnnnnnnnnnnnnnnnnnnnnnnnnnnnnnnnnnnnnnnnnnnnnnnnnnnnnnnnnnnnnnnnnnnnnnnnnnnnnnnnnnnnnnnnnnnnnnnnnnnnnnnnnnnnnnnnnnnnnnnnnnnnnnnnnnnnnnnnnnnnnnnnnnnnnnnnnnnnnnnnnnnnnnnnnnnnnnnnnnnnnnnnnnnnnnnnnnnnnnnnnnnnnnnnnnnnnnnnnnnnnnnnnnnnnnnnnnnnnnnnnnnnnnnnnnnnnnnnnnnnnnnnnnnnnnnnnnnnnnnnnnnnnnnnnnnnnnnnnnnnnnnnnnnnnnnnnnnnnnnnnnnnnnnnnnnnnnnnnnnnnnnnnnnnnnnnnnnnnnnnnnnnnnnnnnnnnnnnnnnnnnnnnnnnnnnnnnnnnnnnnnnnnnnnnnnnnnnnnnnnnnnnnnnnnnnnnnnnnnnnnnnnnnnnnnnnnnnnnnnnnnnnnnnnnnnnnnnnnnnnnnnnnnnnnnnnnnnnnnnnnnnnnnnnnnnnnnnnnnnnnnnnnnnnnnnnnnnnnnnnnnnnnnnnnnnnnnnnnnnnnnnnnnnnnnnnnnnnnnnnnnnnnnnnnnnnnnnnnnnnnnnnnnnnnnnnnnnnnnnnnnnnnnnnnnnnnnnnnnnnnnnnnnnnnnnnnnnnnnnnnnnnnnnnnnnnnnnnnnnnnnnnnnnnnnnnnnnnnnnnnnnnnnnnnnnnnnnnnnnnnnnnnnnnnnnnnnnnnnnnnnnnnnnnnnnnnnnnnnnnnnnnnnnnnnnnnnnnnnnnnnnnnnnnnnnnnnnnnnnnnnnnnnnnnnnnnnnnnnnnnnnnnnnnnnnnnnnnnnnnnnnnnnnnnnnnnnnnnnnnnnnnnnnnnnnnnnnnnnnnnnnnnnnnnnnnnnnnnnnnnnnnnnnnnnnnnnnnnnnnnnnnnnnnnnnnnnnnnnnnnnnnnnnnnnnnnnnnnnnnnnnnnnnnnnnnnnnnnnnnnnnnnnnnnnnnnnnnnnnnnnnnnnnnnnnnnnnnnnnnnnnnnnnnnnnnnnnnnnnnnnnnnnnnnnnnnnnnnnnnnnnnnnnnnnnnnnnnnnnnnnnnnnnnnnnnnnnnnnnnnnnnnnnnnnnnnnnnnnnnnnnnnnnnnnnnnnnnnnnnnnnnnnnnnnnnnnnnnnnnnnnnnnnnnnnnnnnnnnnnnnnnnnnnnnnnnnnnnnnnnnnnnnnnnnnnnnnnnnnnnnnnnnnnnnnnnnnnnnnnnnnnnnnnnnnnnnnnnnnnnnnnnnnnnnnnnnnnnnnnnnnnnnnnnnnnnnnnnnnnnnnnnnnnnnnnnnnnnnnnnnnnnnnnnnnnnnnnnnnnnnnnnnnnnnnnnnnnnnnnnnnnnnnnnnnnnnnnnnnnnnnnnnnnnnnnnnnnnnnnnnnnnnnnnnnnnnnnnnnnnnnnnnnnnnnnnnnnnnnnnnnnnnnnnnnnnnnnnnnnnnnnnnnnnnnnnnnnnnnnnnnnnnnnnnnnnnnnnnnnnnnnnnnnnnnnnnnnnnnnnnnnnnnnnnnnnnnnnnnnnnnnnnnnnnnnnnnnnnnnnnnnnnnnnnnnnnnnnnnnnnnnnnnnnnnnnnnnnnnnnnnnnnnnnnnnnnnnnnnnnnnnnnnnnnnnnnnnnnnnnnnnnnnnnnnnnnnnnnnnnnnnnnnnnnnnnnnnnnnnnnnnnnnnnnnnnnnnnnnnnnnnnnnnnnnnnnnnnnnnnnnnnnnnnnnnnnnnnnnnnnnnnnnnnnnnnnnnnnnnnnnnnnnnnnnnnnnnnnnnnnnnnnnnnnnnnnnnnnnnnnnnnnnnnnnnnnnnnnnnnnnnnnnnnnnnnnnnnnnnnnnnnnnnnnnnnnnnnnnnnnnnnnnnnnnnnnnnnnnnnnnnnnnnnnnnnnnnnnnnnnnnnnnnnnnnnnnnnnnnnnnnnnnnnnnnnnnnnnnnnnnnnnnnnnnnnnnnnnnnnnnnnnnnnnnnnnnnnnnnnnnnnnnnnnnnnnnnnnnnnnnnnnnnnnnnnnnnnnnnnnnnnnnnnnnnnnnnnnnnnnnnnnnnnnnnnnnnnnnnnnnnnnnnnnnnnnnnnnnnnnnnnnnnnnnnnnnnnnnnnnnnnnnnnnnnnnnnnnnnnnnnnnnnnnnnnnnnnnnnnnnnnnnnnnnnnnnnnnnnnnnnnnnnnnnnnnnnnnnnnnnnnnnnnnnnnnnnnnnnnnnnnnnnnnnnnnnnnnnnnnnnnnnnnnnnnnnnnnnnnnnnnnnnnnnnnnnnnnnnnnnnnnnnnnnnnnnnnnnnnnnnnnnnnnnnnnnnnnnnnnnnnnnnnnnnnnnnnnnnnnnnnnnnnnnnnnnnnnnnnnnnnnnnnnnnnnnnnnnnnnnnnnnnnnnnnnnnnnnnnnnnnnnnnnnnnnnnnnnnnnnnnnnnnnnnnnnnnnnnnnnnnnnnnnnnnnnnnnnnnnnnnnnnnnnnnnnnnnnnnnnnnnnnnnnnnnnnnnnnnnnnnnnnnnnnnnnnnnnnnnnnnnnnnnnnnnnnnnnnnnnnnnnnnnnnnnnnnnnnnnnnnnnnnnnnnnnnnnnnnnnnnnnnnnnnnnnnnnnnnnnnnnnnnnnnnnnnnnnnnnnnnnnnnnnnnnnnnnnnnnnnnnnnnnnnnnnnnnnnnnnnnnnnnnnnnnnnnnnnnnnnnnnnnnnnnnnnnnnnnnnnnnnnnnnnnnnnnnnnnnnnnnnnnnnnnnnnnnnnnnnnnnnnnnnnnnnnnnnnnnnnnnnnnnnnnnnnnnnnnnnnnnnnnnnnnnnnnnnnnnnnnnnnnnnnnnnnnnnnnnnnnnnnnnnnnnnnnnnnnnnnnnnnnnnnnnnnnnnnnnnnnnnnnnnnnnnnnnnnnnnnnnnnnnnnnnnnnnnnnnnnnnnnnnnnnnnnnnnnnnnnnnnnnnnnnnnnnnnnnnnnnnnnnnnnnnnnnnnnnnnnnnnnnnnnnnnnnnnnnnnnnnnnnnnnnnnnnnnnnnnnnnnnnnnnnnnnnnnnnnnnnnnnnnnnnnnnnnnnnnnnnnnnnnnnnnnnnnnnnnnnnnnnnnnnnnnnnnnnnnnnnnnnnnnnnnnnnnnnnnnnnnnnnnnnnnnnnnnnnnnnnnnnnnnnnnnnnnnnnnnnnnnnnnnnnnnnnnnnnnnnnnnnnnnnnnnnnnnnnnnnnnnnnnnnnnnnnnnnnnnnnnnnnnnnnnnnnnnnnnnnnnnnnnnnnnnnnnnnnnnnnnnnnnnnnnnnnnnnnnnnnnnnnnnnnnnnnnnnnnnnnnnnnnnnnnnnnnnnnnnnnnnnnnnnnnnnnnnnnnnnnnnnnnnnnnnnnnnnnnnnnnnnnnnnnnnnnnnnnnnnnnnnnnnnnnnnnnnnnnnnnnnnnnnnnnnnnnnnnnnnnnnnnnnnnnnnnnnnnnnnnnnnnnnnnnnnnnnnnnnnnnnnnnnnnnnnnnnnnnnnnnnnnnnnnnnnnnnnnnnnnnnnnnnnnnnnnnnnnnnnnnnnnnnnnnnnnnnnnnnnnnnnnnnnnnnnnnnnnnnnnnnnnnnnnnnnnnnnnnnnnnnnnnnnnnnnnnnnnnnnnnnnnnnnnnnnnnnnnnnnnnnnnnnnnnnnnnnnnnnnnnnnnnnnnnnnnnnnnnnnnnnnnnnnnnnnnnnnnnnnnnnnnnnnnnnnnnnnnnnnnnnnnnnnnnnnnnnnnnnnnnnnnnnnnnnnnnnnnnnnnnnnnnnnnnnnnnnnnnnnnnnnnnnnnnnnnnnnnnnnnnnnnnnnnnnnnnnnnnnnnnnnnnnnnnnnnnnnnnnnnnnnnnnnnnnnnnnnnnnnnnnnnnnnnnnnnnnnnnnnnnnnnnnnnnnnnnnnnnnnnnnnnnnnnnnnnnnnnnnnnnnnnnnnnnnnnnnnnnnnnnnnnnnnnnnnnnnnnnnnnnnnnnnnnnnnnnnnnnnnnnnnnnnnnnnnnnnnnnnnnnnnnnnnnnnnnnnnnnnnnnnnnnnnnnnnnnnnnnnnnnnnnnnnnnnnnnnnnnnnnnnnnnnnnnnnnnnnnnnnnnnnnnnnnnnnnnnnnnnnnnnnnnnnnnnnnnnnnnnnnnnnnnnnnnnnnnnnnnnnnnnnnnnnnnnnnnnnnnnnnnnnnnnnnnnnnnnnnnnnnnnnnnnnnnnnnnnnnnnnnnnnnnnnnnnnnnnnnnnnnnnnnnnnnnnnnnnnnnnnnnnnnnnnnnnnnnnnnnnnnnnnnnnnnnnnnnnnnnnnnnnnnnnnnnnnnnnnnnnnnnnnnnnnnnnnnnnnnnnnnnnnnnnnnnnnnnnnnnnnnnnnnnnnnnnnnnnnnnnnnnnnnnnnnnnnnnnnnnnnnnnnnnnnnnnnnnnnnnnnnnnnnnnnnnnnnnnnnnnnnnnnnnnnnnnnnnnnnnnnnnnnnnnnnnnnnnnnnnnnnnnnnnnnnnnnnnnnnnnnnnnnnnnnnnnnnnnnnnnnnnnnnnnnnnnnnnnnnnnnnnnnnnnnnnnnnnnnnnnnnnnnnnnnnnnnnnnnnnnnnnnnnnnnnnnnnnnnnnnnnnngatctcctgacctcgtgatccacccaccttggcctcccaaagtgctgggattacaggcatgagccaccgtgccgggctgaaaaataaccctttagatatctacagctttaaactgtgtgcagtcatgaaaagcagacattagaagtcattggcatttaataaattgcagtaaaattatacagtaaatacattacaatcattaataataggctttaatgagaagaatttaataaataatcattaaaaagacagcagaattttattctgttctcaatatgttgctgctcttcttatcaaatactataataaaactatatgactataatatagatttcaggagctaaaaaaagccttatattttcaaataaaagaacaatataaattttgcaaaatacaatgagcattactgaagtataaagtaaatatttggaattaaaatatatggtcatttagatacagactaaaaaagaatagaaatcttaatgattcctttctgcctacagtgagcttaaaattacaaccaaaaattttaataaatatgtagcacctacaagaaattttattaacagcttacataatgtgtaaatttgagcaatttattttagaacttttgaatctgaaaatcacctgcttgacattcatttgagaaagtgaaacataaaggagagtaacataagcaagacgacagaatgggaggttctgcatccacatcccccacgacataatgcagctgccacagcaaacataagtgcattcatgaaagccttggaatccagttcagagtttgtgacacccagctggaggcaaagaccaaggaagacatctttagagggtaagcacttgaccaagtggcaagcttgccaatcatggtcctcgcttcaaaacagaatactgccacatcttactgtagacttggctataactcatttgaccttggtcctgacactgcaacagtctgtggaaaacacaagagaattcatactcacctgagacttagatgacaggcctgcagaacttggttctctctatagtccctgaatcaggcaaaacacaccttctttccttctccagccatggtctggaagaaatcttcacattgatatgatgaaatgctaactaacaatatgaaaaatactaaagtataaatgtcactaaaatggtaaatacatactgaatttcagaatactataaattgttatcatcttaaactagactattaaaatacaagatgttttacataagtctcatgataaccagtaggaaaaaaaaatagtaaagaaaaagagaaagtaattaaagcatacacaaacaacaaaaattacacattggatatggtgtctcctgcttataattccaacactttgggaggccaaggtggaagaatcaaatctccttgggtgttgtggtacatgtctgcagtccaagctacttgggtggctaaggtgggacgattatttgagcccaggaggttaaggctacagtgagctgtgatatgccactgcacttcagtctgagcaagaaagcataactttgtctcaacaaaaatgaacaataccacaggaaagacagaaccagaaaaaaaagaagcaaacttaaaatggacagaaaactacaaatgtacaatagtaactgcttacctatcactaccttacaaataaaaagattaaagtatctactaaacagatactgctgtacactgaatgtcatctccaaaatttaggataaaatttaatagccaacatgttagaattaacaggtggaacctttaaaaattaattaagctataagcactctgccctcatgaatggattaacgttcttattatgggaatgggctaattataacaagaatggatctgttatatattaaaaaaaaaaagctctctctccctcacatctttgtgtatgttattatccagcaactagaccttcaacatataccagtataatgttgttttggcttcccagcctccagaatcatgagtcaaataaaattctattctttattaattaccagtgtgtgatattctgttatagcagccaaaagagactaaagcagacagagtggataaattaatcttttaaacctcataatatgctgcttacaagagactcaattatgaattaagagcataggctaaaagtgaaaggatagaaaatgatattccatgcaaataataaccaaaggagtgaaatggtaatgcttaaattagacaaaatagactttctagcaatgtctctcacaagaatgaaatgagtttaccatacaataatagaggttaatttctcaagagaatatagctttatatatttatgcacccaaaagggaggcttctaaatataaaaagcaaatattgccagaactgtagggagaagtagaaagaaacccaataatagaaaactttaacgaaatgtataataaaggacatatagttaacagcattgtaaattggcaagggaaagctggtctcatgtgttgcgtttgagaatgcagcaaagaaagtgggaactgataattttactgcaagcctgagttaggatgaaaaacagggtggtcgattagaggttccacttgccatacattaaaaaaacacaggagaaaaccagtcctcctctggagtgttaaaataattaaagatcagaaaattagtctaaagtggctctagtgccctgtgttcataggtaaaaaacaaaaaacaaacaaaaaaaaatctaaaacctaactcaaatatatttcctataaaacactatcttagcctgaagcaaaatgcaggtttaacccatgacaaacatgcaattaacctctgaatatgtaaccaggacatttccatctggatagttcaaataaggctaccatataactggaaccaattcttgaatttgggttgctttctcatgcatcttatgaaagcctttcctttatgcccctctggtggaccagaaatcatggctgggtgctttccatttcaccaatcactctttgttcagataaactgatgaaccttttaacatagactcccgttaatttttaacacgagagactgtggaccccacgggccgcagctcctcccacgcaaacacccactcgcggtttttccctgatgacccatctggcctccctgaacaatttgggaaatactcatggctgtgggcgcagagcagggcgctgcccagggacaggaccggatgggccggacgggacgtgggggtcctcgctgctggcccagcggccatcttgcagccacaggggactgagggccaagctgcgggagactcggagctaaccgtggggaggccggtcctgccggtttcacagtctgttctcccctctcgggatggcgaaccccgtatactcaccatttcccagcttccaggatgtcctggcaccttaactatgcgtccccaaggacctacagatcgcagggcaacaggggctgtgacagagtagcccagggctctcaaggtgcaggaggcgaaagaggagacagatcccaagctcctgtgccagcaccagcgagagacacagatcccgccaaatgcaggaagccacgccctcctttcctctcctctgccaccgcgcgcctgattgggcggttcccacatcagtgtcaatgactggataaaactccaggacgcacccaccctcgcctgactcctgcccttacccccactccccctcagacttagtgcacttttgttagtttgtttttaagttctggaatacatgtgcagaacgtgcaggtttgttacatagttttacatgtgccatggtggtttgctgcacctatcaacctgccatctaggttttaagccccatatgcattaggtatttgtcctaattttctccctccccttgacctcaaccccttaacaggccttagtgtgtgatctttggctccaggtgtccatgtgttctcatttttcaactcccacatatgagtgagaacatatggtgtttgctttcctgttcccgtgttagtttgctgaggttaatggttcccagcttcatccacgtccctgcaaaggacatgaactcattctttttatggctgcatattatttcatggtgtatatgtgccacattttctttttccaatctatcaatgatgggcattagggttggttccaagtctttgctattgcaaacagtggtgcaatagacatatgagtgcatgtgtctttatgctagaatgatttatattcctttgggtatatacccagtaatgagattgctggatcaaatggtatttctggttctagatccttgaggaatcaccacactgtcttccataatggttgaactaatttacactccctccagcagtgtaaaagtgtttctattcctccacagcctcaccagcatctgttgtttcctaactttttaataactgccattcaacatggtgtgagaaggtatcccattgtggttttgatttgcatttctctagtctccagtgatgatgagcttttctcttttttgtgtttgttgaccacataaaggtccccttcttcttcttcttcttcttcttcttcttcttcttcttcttcttcttcttcttcttcttcttcttttcttcttcttcttcttcttcttcttcttcttctccttctccttcttctttttctatttattttacttattattattatttttaagatggagtcttgctctgtcacccaggctggagtgcagtggaaggatctcggctcactgcaacatctgccacccaggttcaagtgattctcctgccttagcctccccagaagctgggattacaggtcacccgccaacacatcctactaattttttgtgtttttagtagaaatgcggtgtcgccatgcggcccaggctggtcttgaacacctgacctcatgatccacctgcctccacggctgaaagtgctgggattacagacttgatcaaccgcgcccagccaaatatcttcttttgaaaagagtctgtttatattctgtgcccactttttgatggtttttttttgtgtgtgtgtgaatttgtttaagttctttgtagattctggatattagacctctgacacatggatagagtgcaaaaattttctttcactctgtaggttgcctggtcactctggtgatagcttcttttgctgtgcagaagctcgttagtttagttagatctcatttgtcaattttagcttttgttgtgattgcttttggtattttattcatgaagtctttgctcatgcctatgtcctgaatggtattgcctaggttttcttctagggtttttatggtttggtgttttacatttaagactttaatccatcttaagataatgtttgcataaggtgtaaggaaggggtacaatttctgttttctgaatgtggctagccagttctttcagcaccatttggtaagtaggaaatctttccccattgcttgtttttgtcaggtttgtcggagatcagatggttgtagatgtgtgatgttatttctgaggcctctgttctgttccatttgtctatatatctgttttggtatcagtactgtgctgttttggttactgtagccttgtagtatagtttgaagtcgggtagcaggatgcctcaagctttgttgtttttgcttaggattgttttgggttgacaggcaaacaggctcctatatttggggtcacgtgcccagagtatcacagctaattcagacgtgagctgagacttgaaatgcacgtgctctttcccttacctgggtctgttgtataatgcatcttagcagctatgtaacagtacgaattagaatatttagacatctttttagcaactttttaacctgcatttttgtaacgcggtaaagaccttcatcccatccctgagcccctctctcacaacactgcaccccactgctgaccacactgttgtgtgaccattaggaatcaggggggcagcgggggctggaaataaataagaaaggattatgtttcccaaatttgctcaccttagaaagtctcctcaaccattctgtgtgaggtgatttttccaaggtaattgtgccctgactgcgctggatgtcagtgtgtcttgtctttttgaaaatcactggattactctcatgaacggggtatttctctttctatttgaaaatggtcaactgtcctctgcaggtgtcctgacttgctagtttagaccctgaaggtagcggtgagaaaatatttgggccacatcagaatacctattctcagctggaggatatatagaaatttcttaataatatctaaccattttctcaataaccattatatttaacattgatagcttggagggcagggaaggacacagatgacacaatcttcaaagtttaatttagttataaggttttttttttgttcttgcttagttttgcttagtttttggatacaaggtcttgctctggtgcccaggctggagggcagtggcataatgataactcataatttggttgtaacggttctttaaaatatatttttgctgagagtgctagctcatacctgtaatctaaacactttgggtggccaaggtgggatgatcgcttgatcccaggagttcaagacgagtctgagcaacataagtaggctcagtctctagaaaaatatttaaaaattgtctgggtgtagctttgcatgcctgtagtcccagctacttgagaggctgatttgaaagcatcactggagcctaagaatttgaagatgcagtgacccatgattcagccactgcattgacagagtgagatatgtgtgtgtctgtctgtgtgtgtgtataaagaatttgtatgtgaaaaaaattcaagcacaggagaaaagtgaaagcccatggtgggggatgtggagaaaggtcactgtggctccagcaactcagtgagacttggttttccatcttgaagaattgcccatccacactgacaccatagcctaacatatgccagttctcacactacacctgctgggataccagtatgtagccttttgaaaaaaataaaatctttcacctaagagaaggacaagagaaaacgagggtttcacatctaaagccttcattttctttatgaatcaacagccacttgtcatttcaattgtccagaggcgactgacagcactaatacacttaatgaatcaaccaggaaaaatgggcctctcaggtgaggaggaggcacaatcgtcacaaaacccaatccgttctcagctttgcatggtgctcgcatctcaagaagtggtgttagccatgtgaaccgtgttcactggacaaggccagaggaaagaatatgtagtacaacacaactatggggctgcaaatcaaactggtagtgagagcatgcatgaggcttcagtggccgagacactggtggctacccttcggtgtcacttaaatctttgaggtgaaggacatctttttcccaactggctcagagaaactaatcaacattaaaattgagatttgtttttcttttcaaaatttctaagacatagaggactctctaacactccaaaagacattcagctatacatgcagctgaggacctgcctgctctgtagagggatggcagagcagcagccaccagctttagtagctttaagctcctcttctcataggaacaggccacccccacacaacccccctaacttcataggctctggctgtcaggtgcacctgggggactgtcttcctcccatctcattagctctcgaagacagttcagctcaatgtaaaacctaccttaggatggtgagttgtaggctctcctctattctcccagcgcagtgtgacttctggagagtgcttctccatcctcttacctcagatgatgtgaaaagagccggttcccgggcagttagatgttcagtgacataacaggcccagcatgcgcagggcctggccccacaacctggcacctctcccttacctggccttcaggctggacttttctcttctgccacaaatgtcaggtgatgatcacctctgccacactctcatgagcttggtaagtatcaggggtgtaaaccccaacagatttcctgtgactctaccctcttaccacccactcaagtgacattataagcataattttacatttgatattatttatgcgtaattttttttataacatttctgacaacagcccacacaacgaaatgagtctgggttacagaacacacgggcgaggctggggtagcaggcttcaattactttattccaatgtgaaatgaagattgatgatttaaaaacaagacaaagttgtttatcagctgtggggtggctacacttgctagctcatgctcactttctttgaaacaaggtatctgtacagaccatactcataagtagctcttcacaaaaccccagacagaagtcccagtcagacacagctccctcaggctcacagggcagcaacctcctcctccatgttaggctctgacagcaggcaagggaagaagcacaggcagcaggggacagggagatgtcccggactgtagggatccccaaatgccccagagctattatctgtagaagggtgcacgcaggtctcactctgacagtgcagtggctgaatcatgggtcactgcagcctcaaactcttagcctccagtgatgctttcacctcagcctctcaagtagctgtatggcaaaaagcctcctatttttttacttaaaacctggacttcaagccaggttggacctggggatagtggcagcaaaagcagcagccaaatgtatacactccagatgtctacactcatgggcacaggcatattccactcttgctggagcacgagaggcctgagaggcacctgtttcccagttgctaactgatgcccacacaccccattcacgtgtcttcatttaggtctctgcatcgtgtattccctcagccagtgcaaacacatcttctggggggcatcattaattgcagcacctgcccctcttgttctgggagggagtcaagaggaatctggtcagctcctaatcccccaggacaaaggtgctgcccccttttcagcactcacatccagcaatgccatctctggatgggtttttcaaacacaagtagcatgaggtagcaagcatggtgtgacaggctcagggccatgggcagccggttgctggagaagcagcacagggcaggcacatctgtgggtggcaccatgacaagccaaggcagccacagcccctaatcccaacagctccagcccagttggcattcaaatcttcccagatagtattggggtacgcgatgcccatcactcgcccgctcattagcacggccttgttggttactcagagactaaggagagagagtgggggatgtagatccagggtgggcaccgccttgcagccagagtccacctgactgcaggccagcaagcaagcccaagcagctcagctctagtcacctctggctgtactttatgtgtatactttacacaaaggtagcaaacagaggtcaacattagctgttgtgacatgaaagtctatgcctcattaagaccttaaaatgctgttgtcttaagctctctttattccactaaaatttatacaaataaacacatgcaagctgaaactactataaaggaaatattaggattttttaaacccataaacagacatgaaaacagtcactgtttgattgcagagaaagtgagcttctaaagcagctgaccacaaaacagcctcaccaaaccccaggcaggccaggcagtctgaacactacaaggccacgtgatggtcacagaggatgacagctcccgtgagtattgcaaggcactgtgttagcttctcactcacagtctcagaataccctgtgaggggaggccccgtctcactagagcacaggaggttcctgagctcttcccagaaaatggtcatcaaacgatggagcagagggaagcccagacagaacaagtgagtccctagggtctccttaacctccctcagctcctccacatgggtccctgagggaaagtgagcagcctcctaacccccttgatagggttccagtcctgcaggtcggactctctcattttatgctaccatagggggtgacaatgcaaccccaggccccttatttgccatccctcaatgccaggccaggcccagagccctttgctaacacagcccaggggatgctcaaggcccacctcggcacagtcacctgtagtgtactgagatgagcaaggaggtgcaagtagacacaaatccccatgggcttggcctcagccatgttccacaggctcagggcctcgcagatgagctcacagccctccttcaggaagcctgcagatcacaccctcagggagcagtgctcagatgagcaggcaggccccacatcccccaccccatgacgctctgttccactttgcaggcttctgcattggccagtccccactgctttctggtgagatgtccgagttgaagtgaatgttgaaggccacacagctgatggagctcactgccttgcacatgttgtaaatcacctcctggcttcaagggtcagctgtggagacacagcttgatgggaggtaggcccactccaccatcagtggtgctgggttgccctgatctgcaccttccagatacttgctaagatatctgcatgcttctctaagggactgggtcacgagacacccctggcaaggaccagctggcagaacaggctggacactctccctcagcctccccagcagccccacctgtgctgtcatctgtgctgatgatctccgtggtaagattatgggaaacttttacagcaagttttcctttctcacttccctatcttaataacagcactgataacttttaagccctagcaagctgaaactgcaagacacatgatcttctgccttagaagggccatgtttgggcagtgggtgcccaggtgagagccccatggttgttagtggcagccgggagctggatgggcctgccccatagcctagtgaaaagtgggaccctctccttccagagcatggaagtctcagaggctggaaaaaggtgcctaagtggcctgccaaaaagcataaggctagaaggcctggaaagagccccaacagccttcaagctgcctgagagggctgggctcattccagctttctttgctttcatcctgttagcaagaaaacctgctcacagatggcaggcgggcctgaggctgccattccctcatcaggggctataggcacctttaatgtggctctttcttgaagcagctgctcaggccggttctcgaagagcagttccctcattatccacaggtccttcttccagccccgtgtctgcagagggactagggagggagacaagggctcagcctgtgccccacaacctgctttgagacatctcttttgttacttcctcacagacagcctgaaacttccaaatgaacagaccagaatggagcctccaggaaagtgtacagaattctgtctagtacccagaaggaagggggttcccagtgaaggcagggccaggctgcatgcacctcttcaaaaatgttctcctcatagtccacgctcaaggtgtacatcctctgtgtgcttgcagtccatggcagcctctgccttgggaacagtccagctgcacacctgcaatatggtggtgaccctcttgaatggatggttctgggccccattgcagacagcagatagggagatgctcagcccatcaagcccagagccctgccacaggcttctgtgaggcctccacctgctctgggttcttgccctgagaggctgccctgaagtcaaacagaagcaggtgggactctcttccacagctgctctctctcccactgacagctccctagagggtaactcagacagagaagatagaattctcaggcagaaggacaggagtttcggctgccgattcattccatacccccacatgacatgacacaaggcaggggctgtgggacaaaggcattgcctttccttctggcaagaggaatgccttaggaagcaggtctggtggggctagggttgagcgataggcttcaggccacaaggagtggatggacactgagcaagtatcctggttatctgtccacagatccagaacaagtggcatcccaggagcctgggaggggctggcagagacttactgtgtccagcaaaagccccatgtggatgcggtaatgctgcctgctggtccttgtctgtaattacaaacaggtacatgaggtccccatggatcttgcagctctcagggagtgggttccagctgctcatgttaggcacttttagtcactgaacgtgcttcaggaatggccaagtttgattaagccaggcgtcttgctgtgagaccctccacccaactgaggaccctcttccttgtcccccctgacagtttaccttccagttctggttctggagacacgatggcccttcttgggcccctgggagaatgtgctcagatgacacacagtcgacagggcccatttccaagccattcttccatttcccactgtttgaggggccgaggccggtgatcagcacagggccacccagggccagctgtctgcacctaaacgtcatgttggtctggatgtctcagggccagaactctccaggtaagatggcctggtcctcagcacctggcctccatgctcctttttcctctgttcaatcctggccccaatgcctcccgcaactctcaggtcaccattggagaagatgctcaggaagaacaaggagctgcagtcaaccctgctgaaggtggcatatgggtccaggctcttgagctggtcttcgacatggtacatgtggatgcaggctttgagcagtgtgagtagctctttccggaaggaggggaaaacggtgttaccagggtcctacaccctagaacgacccatctagcacagaaaacagtttgcaacgtgctattatgtgtgattttaattttgggctttaggctttcatttccaaattccacaataaacacataaggtggggttctgatttcaacacacacacacacacacacacacacacacacacacacacacacattctctctctcttcctctctcttagaatcttccagtgaattcacactgaaagccgaagtcctcccagaatcttgtgagaacctaaatgatctgaatagtttgtcattgcttttagggatctgggaaaatctctgcacatttctggagaccgctgttatgccatttttaataaatctgttgtgcttcaattcagaagtgtgtgaggggagttgtggaggaattggcatttgggttagaaattccaggaacaacagagacagatgacacctgttttctgcttcataatgtcaagttttatgaaggctaaaacctaattctacaaaaaaaattagactgaaaaactttataggcaaaaattatcttattaaataggaaaatctaattattttattttaaaattttcttttccttagtaggacctaatcatagaaatttaaacactgtatgccaacagcctctactgtaggatggtttattgtaagtactcattttacagatttcttacaaaaactttttccgtaagagaaattagaatattgttcaacatatattgaattcacaattattaccttatttctcacttattattttatgattctgttttctttaatatgaagattactatgactgtgttttcactttctgaattatcatgtgtcacatttttctgtaatttcagtttgagaagttgtaaaacagcatgctcaaatgtatatgttatgtatcaattatataattaattattaaaatatttggcttgtatgtttaattgactctaggcacaatattactattagcattttcttccagttttcccaacttttatttgactaatagtacaatttatttccagtttttattttatctgtcaatgttttatactgtatttacaatatttatattgttaccatatgtaaaaatgtaagacctttctattaaaggctagattacagccttacccttttgtgtaaggaaagaagcaatgcatcagtagcataatttaaaactttctctagtattacttaaatttttattccttaaaactttctcatcacatctctttttaataattataatatggtttctttgaaatgttgttgccctaattgtatccaagtaattcaaaatttatactttttatggattcaaaggaagagttgaaaattgtagttacctaggattctttttcagttggacactatgtttattcaggattttatagatcaaagtttctcttaattatgttttagaatttatgtttctgtattttttagagtaggctgtctcacagcagttaattgtgtttttactttctacctatttattatgattttgaattacattattcaagtaagaattcggggaaggtttcttttaagtttgttttgcaattttgcatttctgtgtttcatgttttagggtagggcaccttacatcagtttattgtttttagtttgaatttatataatataattttctatgacaatattcaaatctgtacagcttaagacagtgtgaggcaaaaaatatgaagcatccctatggtcttttgttaatataatgatttaattgtttgtttgcttgtataaatattgcccctattttgtttatgacttgtgtattttcttcttgtttgatggacaataattgattctgtctaagtgagtaatcatggaaattgtcttaatttcaacatctattgtttatattatcctagtgtgaaagaaagacttatgcgatttgaagataatttttcaaaaactttgtaactctctctcttcaggtgtctttacttatttattttttgacagactctcaccctgtcgccaaagtgcagtggcacaatcttggctcactgcaacctccacctcccaggttaaagcaattctccagctgctgcctcttgagtagctggcattaaaagtgtgcactaccacgcctggttaatttttgtgtttttcatagagctggggtttcaccatgttggccaggctggtcttgaactcatggcctcaagtaatctgcatgcctcagcctcccagagtgctgagattacaggcatgagccatctctcttggcccttgggtgtcatttttaatttcgattgtggtaaaaatacataacataaaatttagaatctttaatattttttcttatacagttcagtcatgttaatgtatttacattgctttgcaacatatttgtaaaacttttttcttttgcaaaactgaaactcaggacacatgaaatgacaactacccattttccttacaacctggctcctgataaaaatcattctattttctgtttctaagtttcaatactttagatattacatataagtagaatcatagagtatctgttttattgtgactaattttacttagcatcatgttctcaagatttctctttattgtggatggtacaagattttctgcctttaaaagctgagtaatattccattacttttgtattacaaattatatttatttattcattctatgaggaaagtttgtgttgctttcacctattggcctttgtgaataatgctgcaatgaatattggtatgcaaatagctatttgctcatatgtatgaggtttacatgtgtgctaccttctgttttattggaaaaattgtctgtctttatgctagaaacaaactgttttcattgctgttgctttgtaatgtgctttgaaatcagaaaattgaggccgctaacattgtttttttttaaaacatttttgggctctttatggtcgcttgacattccatataatttgttggttcctttttctatttcaaaaacattgctaatttaaaagggattgcattgaatctgtaactcgctttaggcatcatgagcattcttcataatatcaagtcttacaacccttaaacatgagcatgctcaaaagtgagttgtttaatttccatatatatgttgctatttttgttttcttctgttattcatttctagttttattccattttgatcagaaataatagtcactgaaaggctaaaccactctgggaagtgacccccattatagaacattacaaagagatgtgagggcaccacttctgccctgatgggctagagggatgtgttctctgagatgacacgttgcagacaaatgcagggaacaatataacccccttttcatgtaaactcttccttatttttctagagtattagtgatagtggtggctttgaagtcttggggaaggtctggcagtgccgtgaacctgcctgctacaggtgataccaggggggaaaaattaaaaccatacaaactgtagaaacatgaataaatacagcctagtgtaaagtaaaaacaacacaaaggccttctctgatatttctacaagaatgtaaaaagggactttacacttaaccaagctgcctttgggactagttaaggctagatttttgggaggcacatctttgggtcactcatggaaatcccctaagagagagcccagagaaattccatatttgggtctggatcctgggcccatcctggttttgtcagacccctgtctgtagagacccccatgtgcctgctctcaccgtaactcactgtatgccatgcttgggggtgtggtgaacctgccagttgtccaaggagatgggggacttgaacccatcaaatatctgctcaatgattttaatgaaactctacagagagtgttcccagcagtgaagcaggaaaaaaaaaaaaagaaaaaagaaaaaaaattaattatctcctttgtttttaccaccaggtgacatctccattagaaattctgtttcctagatcaggaacataggagtatctgcatagacccccagccaatgaggaaacccgaggacagcttaaggccttgggattcacatctgagtagacacacttggtccacaatgctcaactttttattccaccagccatgacctgggtatgaacatgacatagccgccagggttccaatgccttacagcctgcccctgtgagaaagagccccctcctttcctgctccccctgcaacacatggtaatggtagacagggtcgggttgcccagattagatgacacgggtggcctggcatggacggacctgacctgggcttcactgtgttacctctgtttgcctcttgttgaatggccagtggtatcaaggatgtgggctgagccaatatgtatatggtcagaaaagtctctcactttgaacctttctcaggcaacagcttaggaatatagcacacaatgagaacacagtactctctcaagcatctcccatgaaattagctagatagagggctctctctagaatgtgggtttctgtttcccaaagttctaaattctgttaggttctgtcacaagggaagtctgttaacttcttcaaggttttatcccctgagcccttttcctccataaatctatgcaaagtccctactgggctgctgattgctcaccctcatctcccatgtcaactcttttcctgtaaacagttatgcaaacacaattatgcctcttactccccaaaaagatctaaatacagccagggccccaggtttgagagaacagagttggattaaaatcttcttttccttttcatttctgtgaccatatgaaaatgactgtgtgcttcagttctccccagccctgaagtatgcataatgggattaggctagcatcaacttccagaaagagtcattggcgatatatgagatagaatgaatcaaaatcagttggatgtagttgctcttgcctgtaatcttagcagattggtagaccaagatgggtggaacacttaaggccaggggtttgaaaccagccatggccagcatggcaaaaacccttctccactaaaaatgcaaaaattagccagatgtgttgatgcttgcctgtaatcccagccactcaggaggctgaggtgtaagaatcacctgagccaaggaagcagagattacattgagccttgatcatgcctctgcactccagcctgggtgacatagcgagactgtgtctcaaaaaaatatatatactatgtatatataatttatatttatatattatatataatatataaacttatacatatacacctttatgtataaaagatatatatttcatatatctgtatacataaaagatatatattttatatatatggccttatttttccattctacagcagaagaggttgaaatcaaaagaaaatcagatactgtattctggcattaaatattccagtgctgtgcattatatttggaatcacatgtatatgcttcatctcagcctatgtggtgggcacccccaacaaagtctcacaacaacactaagttgtgagtgactctgttatttaaaaacgcagctcaccgctcagtgcctcagaagccggtactataacaccgggtttccaacaaagacattggattccagctgaagcctctttccctgtgcttacttaaaggtagtaatattctcagaaaggtttaagaggtggcttcttgtttagcagggaattgctgaaaggaaaaatgtatggaaagtcactgggcatgaacagccatcttttcctgctacacacaggtcatgtgcaaatttggggacagttagtacaaaacatgtgatggaaatttgggctcttacatcagtgagcttatttcacacagactccagttgaccatattggttccaaccaattttagccactttttagaagtctcataagtggaataaatttcattctttcaacaagttctatcttttcttatctgtcattctgcaaactgaagaatttctgctagtcgttggttgaactctttggggacctggttctagtttctgtcaaagagaatacaacaaatgtgataggttatcacttctgacttagttcaggcttctataccaaaaaacatagactaggcaacttataaacaaaagactttagttctggaggctagaaatttgagattggcttccagcatggttgtggtctggtaaggactctcttctgagtttcgaactccagacttcaggttgtattctcatttagcagagagaaggacagacagccttctgcggtttcttttacaaagccagtaatctctaccacgagggcctcatgcttaggacttaattacctctgacctgctaaggccattaaactggggattaatgttctggaatgtgaatatggtggggaatcacatagtctactgcaacttccaaagttatatttccaaaacagctattattttcctcccacttgctctgtcctgtgtttcgtctctcaatctctctgtctccctttctctttttctgtgcatatgtctgtctatctctttcattttccatctctctattgtattcttcaagatgaggaagcgatctccagtgtcctaagatgctctaggcacagacccacatgatagagaactgaggaactgcccaggccaatcaacaggaagaaactggtgttctcagttcacactgaatcctgccaatttccatgaggcagattggaggctgatctctccccaaatccagcttcagttgaaatcacagccccagcctcataggggaccttgaggcagaggcacccaactaagctatatcgagattctgattcacaaaaattgtgagatagtatttgttgtcaaaatgtgctaaaattcagggcaatgttgtcagagagcggcaaatgactaatctcctctttcaggccccaggatacaccctcccctcttttcctttctttctcaggctgcctacagccacacttgtccctttataacctcctctgctaaactgacttgtgcctctgagtcttttcacaaagagtggcttttccctgacacactttccacacctgcgcagttgtcattctcgtcacaacataatgtcacctcagggaggcattcatgtctcctccaggcaacctctccccagccctccctcccaacattctactttatttccattataaaatgctcttttctttcgcatgtacttgctttagtgtttttgtcctgccgtcctcagactgtaggctccccgcggggatgcagggataacataatcgtttttggtaccacatggtgaacctaccaaggtagctgccacagggtgagtgctaggggaagagtcgctgagtaaaataacatggaaaatcacaaagtccttcctgctttcggtcacccaataatgtggagatcaagaatgataacaggagctgcaggccctcagcctgtctctcccacggctccagctactccagtcaagtccagcgggcacaagaaacacggggtctgcagccacctagagacctccgctagcactgtagtcccaggcagaagcatcacaaaacaggtacctgcactggggaattctcaaggcagtggctcttcagggacccctgggaaaaggagcagtatctgaaggctccaagggccataaaagtgacctcggaagcctcccttgattcctattttcctcagcctctttgagtgtgctgtgcactcattaaacattttaacagcattcggcgacattattttcttccacttccgaatgaggacctcaaggacagcccaaaaaactagtattttttctgggccccacactccagagcccagtgcattgtcacattgtgctttattccaagtcctcatccgcccaagtctctaggcctctctcttctctgaaggacctctagaaactgaaaagcctcttcccagagtctcaaagcacagtgatttaccaatgaaaagccaagggcggcagacacctatgagtatctagaatccttggtattattccttctcagtacccctatttatgagggagaaaacaaaggctttctttcccgtagcctgtctttatatcacacggggtggtgggtggagggcatagctcattttagttccaggtgcccacagaagtgggagtcacaaccccagtcctgtcctcttgaaacagctgggaaagtccccaggcttggaagaacccagggaacctggaggatccttcatcgcatgctgtcagctcctggtcatgtagctgggggagtggatgcctctgcctcatggcaaagctgcatctactgtttcttccccttttgtcacttctttggtttcctcttccctaacctcactttagaatctccactttagatctccaatttagaagcctgtgtgtgtgtgtgtgtgtgtgtgatgtgtttgtgtgtgcatgcctgcacgcctatgtgacaacattgaagagtagaaagcccaggtagaaagtagagcacagggttttccaggactcatgggctctcatttccaaagcaaacctgatgggtggggtgcatgcaaggcctaggaagctggatccctccctaatactctgtgctttgcccaatttgtgggatctggaccagtctttgcctttttgggaggtctcagtcttcctgttgtaaaataaagagttggctacaaaactgtatgagcacatgctcagtgaagacagggtgtcatgctcaataccacagagaatattgggatggggaaagtttgggcagacttaggtgtccatgcgtgctcaggcctctgaacagggccagtgcaggcaaacataaagcacagcacagccaggttttctttccagggctacaggatgaaacagtgcaccacaggatctgctcttgaggtcggtcccgcaagattttcccaccttcaaccagcaactgtttgatgaatttcatgtcctgtgaagcccatatccacccccattacagtgaggggcacagggcactagacctgtaaaataatgtcttttgcctttttttcttttcttttctttttcttttttttttttttaactgagtggatgtttcttctttctctttatctgttttgtttgttttttaactaatttttaagaggtctttacaggtcagctgtggtgcctcgcacctgtaatttcaacactttgggaggatgaggcaggtggattatttgaggtcaggagttcaaaaccagcctggcgaacctggtgaaaatccgtctctactaaacttacaaaaaaattagcggggaatggtggcccaagcctgtagccccagctactcaggaggctgagacagaagaattgctgaaacttgggaggcggaggttgcagtgagccgagattgcacgactgcactccagactgggtgacagagtgagtctctgtaaaaaaaaaaaaaaaaagagagagagagagggagagagagagtgctcttcatggaaacatgagcccctttgtaatttcatgtgttgaaaatatttattccaattttgcaatttcttttcttattgtggtgttctctttaagtttggtttagatgttattagtgtttctccccaaattgatttattgatttccattttcacaatacaatattttggcagaaatcttgtggaaactgtctaatcagtttaaaaatttaaatacatattaaaaaatcaaagaactgtaaaaactgtcctgaagaatgacaaagtttgtgagcttacaatgccatatattcagacttagattaaagctatagtaataaaagctatctatggtagtaatgcaaaaataggcacaaagaaaactagaaaaactcgagagtccaactcagactcacacatttagacattttgtatattacaaaacaggcacagaagagcagtggagagaagacagcatctcggtaattagccttgggtcatctggttatttatgtgagaaagaaataaacctatcttatattgttaacaaatttcgagacaagtggattttaaattttaaggtgaaaattgaaaacaatatttctagtagataacatagataagtatgtccatgactttggcacaggccaagatttcttgggacacaaaatgcataaattatcaagacaaaaatatgacaaattggactttattagaattaaaaccttctcttcataaaaaaaaaagcttcaggagagctgaaaggcaagaacaaagtggaaatcaacatttgtcatatattgatctggcaaaagctttttatctagattattaagctaaatcccatcacttaataaacaaagatgcatacattgaacaaaattggcaaagatatgactaggagttccacatacagaaccgaagggccaacaagtagatgaacatatccacattcttatgcatcagaacaatgcatatgaaaactacaattgaataccactatgcaatcattaacatttttgaaaactgacaaaattaagtattagtgatgatgtcaagcaactggaactttcttataccattctgtgtgcaaactgttataaccacattcaaaaccacttgagtagtaactccttacatacacgatgtacataagcacactctagaacccagcaactctgctactaggtatatacacccaatagaattgccagcatattttccaatgtagtaaagtgctcgaagtagcattatttggtacttttccaaactgaaaaaaactcaaatgtgcatcaataataaaataaataactaaaacagctacatattcctttataaggggacattatacagatataaaattaattggagacatattaaaatatacaaaaatctaacaaatacaatttaattagatttaaaagtcctatccagagcaatcggccaataaaaaagaaaaaggcatacaaatagaaaaagaaattgaattctctttctccatttgcaatatgagtcactacgtagagaatgctaaagcctctccaaaactacttttggggaaaacttgaaaagcctcctgaaacggataagcaagtaaagttttaggacacaaaaccaatgtacaaaaataagcagcatttctatgcatcaacaactttgaattcctgaacatcttctggttttattgcattttcaattttttccctccattaactatacattttttcttttttcagctaaactaatttattcttctgtataatttcaccttgttaataaaccccaggccaaaaagtgggaataaagtatttgtctgcatcctgtttcctcattttgaaaactagtctagacgaaacctatacttgttctagggagttggcatagacagcatttatttccgttctcagcagtgatgccagccagaaagagggagttccccattttcactttggttagacaggactctggatggttgaaggggaaaagtttcagactctaagggagccaaataggatattacaaagatttatgcatttactccgggagcaattattgtgttaaattttgtgcaaaacactgcgcaaacagcaattaaagtgaaaattattaaggcattacctttaccttgggaaactcacactagtcagattctccgaaccccagaacataacaacaacctagtaaaatcttgttcagagtgaagagagggtgggagcaggaaggtaaggttaaaaattaggctgggtgaatgagataattacccctagtcaagcagtggaagtatggatggctttgggatgggtgaagacaaaagaatctcagcagagggtgcagataaaaaaaggcagaaacacaggaggcttatgcaggaagaggaatgagtttgctggactggggagagtgacagtaaaaagcagaggataataggcatctctggtcatctagggactatagggtggattagttgggggttacagaatcagtgaggtactttttaacagtaggatgggtaaataagagctataatttggaataattatgtagcaatggtggttaggagcaatagaaactcaaagtattacataaatatgtttttttcttattctcccacacaagcctttcaccttccctcttaaactgagaacggagtggtttgctatgatgtttttaaattctcacaggcaagcattactctgtgctgccttttaataaaggctaattttaaccaaattaaagaagattgaatggattttcttgatcataatggttgagtacaacatctcttaccttctactagttttcagtataactgaagtaacagaatgtcaatactccatggaggggtgttcctcttgctaaggctccctcctctgggctaggccttctacaccatggctgtcctgctgtggctggagctggaatttggattgacctctgtgtgtcttcctagcacacaataggtgtccaattagcatgggcagaatcaagctcctccctctcaccatttatttctccatttgtcccttgttgggaatggagagtcctgccactgagttcagcccagggttgaagttcaaatctcagctgatacttggtggatgttgacttttttgagaagaacttgggagaataaaacattataaaggcgctggccaggcacggtgtctcatgcctgtattcctggcatattgattggctgaggagatagaattgcttgaggccaggaatttgataccagccttgtcaacatagtgagaccccatttatacaaaaaacttgaagcattaaaaacatttagcctggtgtgatagttccaaactgttgtctcagctatgctggacattgaggcagaggatcacttgagccaggagttctaggctacagggagctatgatcgtgctgctgcactccaaccagggcaactatgcaagatgtttcaaaaataaaatcttttattattcttcacccctatagtctctccagaacttgtgcactatgtagcagaaagaatcaaactccccaagagtttggttcttgcttatgatttggttttctgctgcttggctgccccctcatttccccattttgtataaataagaacccccaggtgaagtggagtttctccccagcagagggtctcaccaaggccccaggactggcactttaggtggaggcttgcctttcaacctctgaataataattgatactaaaattgagaagttttccagacaccagcttcctgaaaggagcacccagtcgagacaagatgaggtcagtagcgaaggtgacccaggctgagtgggccgtacattcctctacttttcccaaacttccctctgacatcctacaaactttctgtcttcccaggactttcttgccagggagtctaatgaagtaaaagctttaaaattgctttgattttaaaaataattttattggttcttaaaatgtactgttaaatattactgtttttcttcccccaggggctacgtgaacataagctcggttttcacactagcagcatttagaaatgtctcttctggaggaacactgatgctctcaatcacacgtggtaattctctcctccaggcacaaaatgcagtctcagcatctctgtatcaggagtcactgtctaagtctctccagagaaataagctacccaggccatccagctgctggtgagttgctttgtggtcatgaactgggtagatttcctcatctcatgctcattggccacattcaggattaatgattcaatgcttttgttgttccagaagctgtggtcagtggctatgcaggagtcagtctttcagtgctgatctttgctgagaaaataatagtattgttcaaacagtatataggatttgcactcaatatttaataatttagtgacaaaaatctcttaaatatacattatactgatataaaataagttactcatctattatcaaatttactcttttatttaatataactcttgggataacattttcttttatgcttccataaatatgcttcacatggatatatcacatattgtgtataatttcacacagtgttaatatagtttccatctatttagatgtttgcacatttattttatctcaatgtttgttctcaggaagagtgtttttctttataaactaaattttcagcaaattttaaatgcatttcactgacgtaattatacttacattgtatttgtgtattaagttacattttgtccttaaacctgaaaataacttttcaaatatatgtaattttaaatttacatgtttttccctcagaactttgaaaaccataacctattggattcttgatcttattcacatattgagaaatatgtttcttttcattgctttataattaatttgaattttatcttagatagctttacgtgattttctctattatggtattatgcttttaactattgtttttcttttgatcagaatgcctttaagctattataattaattattttaataattatatatttttattccctatttgacattcactccattttatttattcgaacttgcacttaaacaacatgacttattttagatttttatgtattttaatttttcatattgtttatttgttttatccctattgggacttctaaatattcacttcatcatatcttctaattcataatttctttttcaattatgtaatttttctatgcattctatcctttaaatttaaaatttttacctaattattttgataatataacttattttgatcttacttttaaacttttcctctaatatatttaaacattataactacttatattatttctacagtatatatacaattttgggattttttaagatgtaatggtacagctgtgtttttcttataattttgtttcttaataactttgatcttgatgacttttactttgtatattttaaaaagaatagtagacttcattttattataaatgactgacctcaattgatggggccattgaagattctgggtcgaggtattttattccagtgaaaagttatctgtaatgttaataatgcaccctttacagacacctgaaaatgattaagtctatatatttacctaaattgtcctgagtaaaacacatagtgtacatataaaccagaaactcatatgatgattggtgttaatttccaaatcaaccaaagaggagaaataccacctccactaactaacctatttttctaaacttttgaaaatgtaaggattctagctttagatagcatagtcagatccaagtactcctgcatctatgctgctgtgacattatattcaccaatcagacacgttaaattctaacaacctgtgcttccattattagcaattcccacaggtagcatcaacttccagcctaatttttattctacagctgtgcttcttcattctttcctgaaaaattatttgtggaggtacatgcctttgaagtttctcagcatatattgttatttgaggttgaaaagataagattatctaaatttttgccagaaactctcatacccacattatatctttgaaagcattggttatcacactgctgctgacatgtgcatgtaggagaagcatgtaaatgtcagcgctttgcagtctctaaggggctgaaataaacaataccggaaatcttggccactgaggctcacatgtagattttcattcccagtccaggcatctagattcaggggcaccttcctgagggccttttggttgaggccttcttcagaaacttttgttcagatccctgtttctggagaagaaatggaactttgataataatttttatagattcctattaatattcaattctctttaatcttgctcatacattctcctctacgctctcctgcccccttttccacaaaattgcgggcctgttttttatgagggtgccacctcggcagtgagacagtgccccatatttgtgctgatccatctgaccctttcctggtgcttttccatgaggaaaaaatggaacaatgaggagtcggtgcttgatctaatgttgcctgttgtttaacacaatcacagaaaggaagacaaaaaggcataactatttctttgatgtgggcctcttgctttaatttaaaactctgatattaagcaggttagctcttcccagctcagctcagctcttgaaatttcatggaagaaattctgtttttattggtctaaattttgtgtcttttatatagaaaaaaggtaataaaattgcatcttatatttaaaaattgaatgccttctgttttgccattttactgaagagaaaatttgtgtagcctattggcattattaacagtgaagctccaagtactaatattcagaaaaaataatgaatcaaaatccaactatttctcagtaccattttcttttttataaactttctattttattgtctgtaatttaaaaacttctgtggaaaagagtttaaaattttcaaagttaatacaaaattatttttagagtttctttttgcataatgtttgtcgtaagtagctaatattaataaattgtaatcatcaattcttatctaagctgcacgttaaaaaatatgttaatatttgctgctgcctaaaatataatacatatttacataatctaatttactaaaaatagtaataaacacatataaataatcaacatacacaggtcattttttctatttcttacttatattttatgtttcatatttgtatcagcacactttatgtcctagtatcatatatggaaacgtgcctattttgcatattgttatattaaataataagacatatgcttagcttcccctaggttaaattttttacataattgttattaacgtaaataatccagaaattaaagtttttaaaaaaatttccagtgccctcactgtgcataatataattctattttttaaagtgttagtgctgtttgcattatataaaagaatattttagtgtatcaactaactacatacctgaaagcatggcttactttttcattagtatatacttttggttgtactcggctatttttctaaaagtgcttgcaaatcagttccaggccacagggctttgtcttcaacaaaataagaatatctcagagacccacagaaataactgtaccaagtactcctataaacaggcttctgatagaatgacttacataactttgaaacactatcagtggactaagttatttctctaattctagcagagaagcatatgtgcttacaagatagagtaaaacaagtatgaataaaacaggactaaatgaactgacaaagaatgataataggttttgtttggaatgtgaacataaaacattcctgctattatttccttggtatctaaacatgagctaatgggagccgttgttacatgttgtacacccttaagaaggtttacagtttttcgtctcacctatattcgtagttgtctttatttgtggtttagaatctcagctcttttcatagctgcctggcactcatcttgtatgagctcctttgtgtttctgaagcctctggcatacaccgagggtgtgggtttgcctggaatgtagcatcaacctgtagagaacaggattttccatgacccagtcattgaataaacttgatatctgcttctgctgttgagaaaacattatttctccttcaggaatatccaccctcttcatcaagaacatcgtgtcattcttcagggtcacagaatgctctacagcctacttcctggtgtccaccaaggaggagattagttgcatctgaattcaaggaagattcgagagggctcacagctgcagaattccaatcactctcagtctgactgtgctgattttagaaagacacatggggatctgccacaaggaaggcactttgcagggaggcctcaaccccatggcacaccccttcaggagggctcttctccttgtaacagtcacttagccacttgtagaaaggcaactcttagaaaatttaaatggggaccaaaatactaaccctaaccagtttattatctcaaagaattggaaaaacaaagttttcgaatactacgggattagaagagtaaacaagatatgccttttctttggagctacatatatgtattaaaaatgggatgtacaaagaattttttatcacatggagaagtgcttatgagatgatataacattaaacaaattaatgaaaggcacacattaaaaagtataaccaaacttatacattagagctcaaaatttaaaatgtgtagaaaaatgattgagaggaaatatgccgaattataggaattgatgtgtttcttataggaagcaggatcctgtgagaaattaaattgctttattgattctcttgtaattttatagtttccaaaagttctacagagagtgtaatgtaggaccttagtcaggaataaacatctctttaaataagcagcagagaatttcaaaggaagtgtgtggtatgggtttatgtgtttctttcaagatctaatattttccacgtagtgcttcagaaaagataaggtaatttcaacaacttaaccccatcatcaagagggtgttacttaagtacattatgggaggtcatagataaacaaccagtcagcctctaagcatcagaaaatctgtgatgtccattggcctgtgagatggtctgcatttctttgaaggaaaaaagcaggttttaaaacactagaaccgaatcaaatccaaatttgaatagaaagattagaaaggcttatgcatgggaaaaagattcagggtattcaacggttaattctgactatttctgagtaatttaaatttacctataatttaaaaaaaaaattaaggtcaggtgtgttgactcaaacctgtaatcccagcattttgggaggccgaggtgggtgaatcacttgagaccaggagtttgcgaccagtatgggcaccatggcaaaacctcatatctactaaaaacacaaaaaatagccaattggtggtgtgtgcttgtagtcccagctacttgggaggctgacgcatgagaatcgcttgaacctagggggtggaggttgcaataacccaagatctcaccactgcactccagtctgggtgacagagcaagaccttgtttcaaaaaaaattttttttgtattttaattaggaatcaaataagataattaaatgtaaacttacacttaatttactttttaagcattttaagaattggtattctaattttgtgtcggtacattttaagaatcaataaaattatttttaaaatcaaagcaattttaaagcttttacttcattagactccctggcaagaaagccctgggaagatagaaagtttggaggatgtcagagggaagtttgggaaaagtagaggaatatatggagggcagaaggagtgaacattagggaaaccctcccctagctcagtcttcagatacgctggtggacttccccactcagcctgagtcaccttcgctactgacctcatcttgtcttctgactggatgctcctttcaggaagctggtgtctggaaaacttctcaattttagtatcaattattattcagaggctgaaaggcaagcctccacctaaagtgccagtcttggggccttggtgagaccctctgctggggagaaactccacttcactggggggttcttattttatacaaaatggggacatgacggggcagccaagcagcagaaaaccaaatcatgagcaagaaccaaactcttggggagtttgattctttctgctacatagtgcacaagttctggagagactataggggtgaagaataataaaagattttatttttgaatcatcttgcgtggttgcctgtttggagtgcagtagcgtgatcatagttcaccgcagcctagaactcctggctcaagtgatcctctgcctcaatatccagcatagctgagacaacagtttggaactatcacacctggctaaatgtttttaatgcttcaagttttttgtataaatggggtctcactatgttgacaaggctggtatcaaattcctggcctcaagcaattctatctcctcagccaatcaatatgccaggaatacaggcatgagacaccgtgcctggccagcgcctttataatgttttattctcccaagttcttctcaaaaaagtcaacatccaccaagtatcagctgagatttgaacttcaaccctgggctgaactcagtggcaggactctccattcccaacaagggacaaatggagaaataaatggtgagagggaggagcttgattctgcccatgctaattggacacctattgtgtgctaggaagacacacagaggtcaatccaaattccagctccagccacagcaggacagccatggtgtagaaggcctagcccagaggagggagccttagcaagcggaacacccctccatggagtattgacactctgttatttcagttatactgaaaactagtagaaggtatgagatattgcactcaacccttatgagcaagaaaatccattcaatcttctttaatttggttaaaactaacctttactaaaaggcagcaaacaataatgcttgtctgtgagaatttaaaaacatcatagcaaaccactccgttctcagtttaagaggaaaggcaaaacgcttgtgtgggagaataagaaaaaaaatatttatgtaatactttgagtttctattgctcctaaccaccattgctacataattattccaaattatagctcttatttacccatcctactgttaaaaagtacctcactgattctgtaacccccaactaatccaccctatagtccctagatgaccagagatgcctattatcctctgctttttactgtcactctccccagtccagcaaactcattcctcttcctgcataagcctcctgtgtttctgcctttttttatctgcaccctctgctgagattcttttgtcttcacccatcccaaagccatccatacttccactgcttgactaggggtaattatctcattcacccagcctaatttttaatcttaccttcctgctcccaccctctcttcactctgaacaagattttactaggttgttgttatgttctggggttcggagaatctgactagtgtgagtttcccaaggtaaaggtaatgccttaataattttcactttaattgctctttgcgcagtgttttgcacaaaatttaacacaataattgctcccagagtaaatgtataaatctttgcaatgtctgatttgactcccttagagtttggatcttttcccctacaaccatccagagtcctgtctaaccaaagtgaaaatgcggaactccctctttctggttggcatcactgctgagaacggaaataaatgctgtctatgccaactccctagaacaagtataggtttcatctagactagttttcaaaatgaggaaacaggatgcagacaaatactttattcccactttttggcctggggtttattaacaaggtgaaattatacagaagaataaattagtttagctgaaaaaagaaaaaatgtatagttaatggagggaaaaaattgaaaatgcaataaaaccagaagatgttcaggaattcaaagttgttgatgcatagaaatactactggtttttgtacattggttttgtgtcctaaaactttacttgcttatccatttcaggaggcttttcaagttttctccaaaaggagttttggaaagactttagcattgtctacgtagtgactcataatgcaaatggagaaagagaattcattttttttttctatttgtatgcctttttcttttctattggctgattgctgtggataggacttttaaatctaattaaattgtatttgttagatttttgtatattttaatatgtctccaattaattttatatctgtataatgtccccttataaaggaatatgtagctgttttatttagttattttattactgatgcacatttgagtttttttcagtttggaaaagtaccaaataatgctgcttagagcatttgtctgcattggaaaatatgctggcatttctattgggtgtatatacctagtagcagagttgctgggtcctagagtgtgcttatgtacatcgtgtatgtaaggagttactactcaagaggttttgaatgccgttataacagtttgcacacagaatggtataagaaagttccagttgcttgacatcatcactagtacttaattttgtcagttttcaaaaatgtgaatgattgcatagtggcattcaattgtagttttcatatgcattgttctgatgcataaggatgtggatatgttcatctacttgttggcccttcggttctgtatgtggaactcctagtcacatgtttgtcaattttgttcaatgtattgcatctttgtttattaattgatgggatttagttaaataaactagataaaaggcttttgccacatcaatatatgacaaatgttgatttccactttgttcttgcctttcagctctcctgaaggttttttttatgaagagaaggttttaattgtaataaagtccaatttgtcatatttttgtcttgagaattaatgcattttgtgtcccaagaaatctgggcctgtgccagtcatggacatatttatctatgttatctactagaaatattgctttcagctttgaccttaaaatttaaaatccacttttcattggaatttgttaataatataagataggagtgttttttctcacataaataactggttgactcaaggctatttaccgagaagactgtcttcactcctcttctgtgcctgttttgtaatatacaaaatgtccaaatgtgtgagtctgagttggactctcgagtttttctagttttctttgtgcctatttttgcattactaccatagatagcttttattactatagctttaatctaagtctgaatatatgtcattttaagctcacaaactttgttattcttcaggacagtttttacatttcttcgattttttatatgtatttaaattttttaaactgattagacagtttccacaagatttctgccaaaatattgtattgtgaaaatggaaatctatgaatcaatttagggagaagttacatagaaacaaagcaaaacaaaacactaataacatccaaaacaaacttaaagagaacaccacaataagaaaagaaattcccaaattggaataaatatttacaactcatgaaattacaaatgggctcgcatttccataaagggcactctctctctccctctctctctctcttttttttttttccacagagactcactctgtcaccctgtcttgagtgcagacgtgcaatctcggctcactgcaacctctgcctcccaagtttcagcaattcttctgtctcagcctcctgagtagctggggctacaggcttgtgccaccattcccggctaattttttgtaattttagtagagacggggtttcaccaggttggccaggctggtttttaactcctgacctcaaatgatccgcccgcctcagcctctcaagtgttgaaattacagatgtgaggcaccacagctgacctgtaaagacctcttaaaaattagttaaaaaacaaacaaaacagaaaaagagaaagaagaaacagccactcagttaaaagaaaaagataaagaaaaagaaaaagaaaagaaaagaaaaaaaggcaaaagacattattttacaggtctagtgccctgtgcccctcactgtaatgggggtggatatgggcttcacaggacatgaaattcatcaaacagttgctggttgaaggagggaaaatcttgcgggaccagcctccagaacagagcctgtggtgcactgtttcatcccgtagccctggtaagaaaacctggctgtgccgtgctttatgttcacctgcatttgccctgttcagaggcctgagctaccgtggacacaaaagtctgctcaaactctccccatcccaatattctatctggtattgagcatgacaccctgtcttcactgagcatgtgtttatgcagttttgtgaccacctatccattttacaacaggaagactgaggcccccaaaaaaggcaaagactggtccatatcccagaaattgggaagagcacagagtattagggagggatccagcttccaaggccttgcatgcaccccacccatcaggtttgctttggaaatgagtgctcttaagtcctggaaaaccctgtggtctactttctacctgggctttctacccttccttattctcacataggtgtgcagccatgaacacacaaacacaccacacacacacacacacacacacaggcttctaaggtggagatcatggaggtgaggttagagaagaggaaaccagagaagtgacaaaacgggaagaaatagaagaggcagctttgccatgaggcagaggcatccactcccccagctacatgaccaggagctgacagcatgtgatgaaggatcctccaggttccctgggttcttccaggcctggggatcttcccagctgtttcaagaggacaggacaggggttgtgactcccacctctatgggcacctggaactaaaatgagctatgccctcccccaaccaccccatgtgatataaagtgaggctacgggaaagaaaaccttcgttttctctctcataaataggggtactcaaaaggaataataccaagaattctagatactcataagtgtctgctccccttggctcttcattggtaactcactgtgctttgagactctgggaagaggcttttcaggttctagaggtccttcagagaagagagaggcctagagatgtgggcagatgaggacttggaataaagcagaatgtgacaatgcactgggctctggagtgtggggcccagaaaaaatactagatttttgggctgtccttgaggtcctcattcagaagtggaagaaaataatgtctctgaatgctgttaaagtgtttaatgagtgcacagcacactcaaagaggctgaggaaaataggaatcaagggaggtttccgaggttacttttatggcccttggagtcttcagatactgctccttttcccaggggtccttgaatagccactgccttgagaattccccaatgcaggtgcctgttttgtgatgcttccacctgggacttcagggctagtggaggcctctaggtggcggcagaccccgtgtttcttatgcccgctgggctttactggagcagctggagccgggggagagacaggctgaggtcctgcagctcctgttatcattcatgatctccacattattgggtggccaaaagtgggaagaagggctttgtgattttccatgttattttactcagcgactcttcccctagcactcaccatgtggcagctaccttggtaggttcaccttatggtaccaaaaatgattatgttatccctgcctccccgcggggagcccacagtctgaggacggcaggacaaaaacactaaagcaagtacatgtgaaagaaaagagcattttataatggaaataaagtagaatgttgggagggagggctggggagaggttgcctggaggggacatgaatgcctccctgaggtgacattatgttgtgaccagaatgacaacagagagccagtcctgcgcaggtgtgcaaagtgtgtcagggaaaagccactctttgtgaagagactcacaggcacaggtgagttcagcagaggaggttataacgggacaattgtggcggcaggcagcctgagaaagaaaggaaaagaggggagggaggatcctggggactgaaagaggagattagtcatttgcccctctctgacaaaatttccctgaattttagcacatgttgacaacaaatactatctcacaacttttgtgaaccagaatctcgatatagcttagttgggtgcctctgcctcaaggtctcttacgaggctggggctgtgatttcaactgaagctggatttgaggagagatcagccttctatctgcctcatggaaactggcacgattcagtgtgaactgagagcccgagttccttcctctcgattggcctgggcatctcctcagttctctatcatgtgggtctgtgcctagagcatcttaggacactgcagatcacttcctcatcttgaggattacaatacagagatgaaaaatgaaagagatagacagacatatgcagagaaaaagagagaaagggagacagagagattgagagaggacacacaggacagagcaagtaagaggaaaataatagctgttttagaaatataactttggaagttgcagaagactatgtgattccccaccatgttcacataccagaaccttaatccccagtgtaatggccttagcaggtcagaggtaattaagtccgaagcatgaggacctcatgatagcgattacgggctttgtaaaagaaaccgcagaaggctgtctctccctctctctgctaaatgagaaaacaacctgaagtctggagtttgaaactcagaagagagtccttaccagaccccaaccatgctggaagcccaatctcaaatttctggcctctagaactaatgttttttatttataagttgcctagtctatgttttttggtatagaagtctgaactaagtcagaagtgataacctatcacatttgttgttttccctttgacagaaactagaaccaggtccccaaagagttcatccaatgactaacagaaattcttcagtttgcagaatgacagataagaaaagatacaacttgttgaaagaatgaaatttattccacttatgagacttctaaaaagtggctaaaattggtcggaaccaatatggtcaactggagtctgtgtgaaataagctcactgatgtcagagcccaaatttccatcacatgttttgtactaactgtccccaaatttgcacatgtgatctgtgtgtagcaagaaaaaatagttgttcatgcccagtgattttccatacatttttcctttaagcaattccgtactaatccagaacctacctcctaaacctttctgagaatattactacctttaagtaagcacagggaaacagacttgagctggaatcccatctctctgttagaaacccggtgttatagtacctgcttctgaggcactgagaggtgagctgcgttttaaaataacagagtcactcacaacttagtgttgttgtgagactttgttgggggtgcccaccacataggctgagatgaggcatatacatatgattctaaatataatgcacagcactggaatatttaatgccagaagacagtatctgattttcttttaatttcaacctcttctgctgtggaatggaaaattaaggccatatatataaaatatatatcttttatgtataaagatacataaactatgtatcttttatatataaagatatatatgtataagtttatatattatatatagttatatataattgatatatatatagttatatataatatataaataaaaatatttatatacattatatatatatatattttttgagacacagtctcgctctgtcacccaggctggagtgcagtggcaggatcatggctcaatgtaatctctgcttcctgggctcaagtgattcttacacctcagcctcctgagtggctgggattacaggcatgcatcaacacatctggctaatttttggatttttcgtagagaagggtttttgccatgctggccatggctggtttcaaacccctggccttaagtgttccagctgccttggtctaccaatctgctaagattacagcaagagccactgcatccaaccgattttgattcattctatctcatatatcaccaaagactgtttttggaagttgatgttagcataatcccattatgcatacttcagggctggggagacctgaagcacacagtcattttcatatggtcacagaaatgaaaaggaaaagaagattttaacccaactctgttctctcaaacctggggccctggctgcatttagaactttttgggaattaagggacataattgtgtttgcataactgtttacaggtaaagagttgacatgggagaggagggtgagcaatcagcagcccagcagggactttgcgtagatttatggaggaaaagggctcaggggataaaaccttgaagaagttaacagacttcccttgtgacaaaacctaacagaatttagaactttgggaaccagaaacccacattctagagacagccctgtatctagctaacttcttgggagatgcttgagagggcactgtgttctcattgtgttatattcccaagctgttgcctgagaaaggctcaaagtgagagccttttctgacagtatacatactggctcagcctacatccttgataccactggccattcgacaagaggcacccacaggtaacacagtttagcccagggcaggtccgtccatgccaggccacctgtgtcatctaatctgggcaacccgaccctgcctaccattaccctgtgttgcaaggggagcaggaaaggagggggcttttcctcacaggggcaggttttaagacacaggaaccctggtgggtctgtcatgttcatacccaggtcacggttggtggaataaaaagttgtgagttgcggaccaagtacgtctactcagatgtgaatcccaaggccttaagctgtcctcgggtttcctcattggctgggggtctatgcagatactcctatgttcctgatctaggaaacagaatttctaatgcagatgtcacctggtggtaaaaacaaagaagacaattaacttttttcgctgctgggaacactctttgtagagctgcattaaaatcagtgagcagatatttgatgggttcaagtcccccatctccttggacaactggcaggttcaccacaccccccaagcatggcatacaatgagttatgttgagagcaggcacatggggttctctacagagagggacctgacaaaaccaggatgggtccaggatccagacccaaatatggaatttctctgcgctttctcctaggggatttccatgagtgaccctcagatctaccccccaaaaatctagccttaactggtcccagtggcaacttggttaagtgtaaagtccctttttacattcttgtagaaatatcagagaaggcctttgtgttgtttttactttacactaggctgcatttattcatgttactacagtttgtatagttttaattattcccctctgatatcatctgtagcaagcaggttcatggtactgccagactttctccaagacttgaaagccaccactatcactaatactctacaaaaatagggaagagtttacatgaaaaaggggttatattgtttcctacatttgtctgcaatgtgtcatctaagagaactcatcccagtagcccatcagggcagaagtggtgccctcacatctctttgtaatgttctataatgggggtcacttcccagagtggtttagcctttcaatggctattatttctgatcaaaatggaataaaactagaaatgaataacagaagaaaacaaaaatagcaacatatatatggaaattaaacaactcacttttgagcatgctcatgtttaagggttgtaagacttaatattatgaataatgcttatgatgtctaaagcgagttacagattcaatgcaatcccttttaaattaagaactttttttttgaaatagaaaaaggaaccaacaaattatatggaatctcaagcgaccataaagagccccaaaatgtttaaaaaaaacaatgttagtgacctcaccttttctgatttcaaagcacattacaaagcaacagcaatgaaaacagtttgtttctggcataaacacagacaatttttccaataaaacagaaggtagcacacatgtaaacctcacacatatgagcaaatagctatttgcataccaatattcattgcagcattattcagaaatgccaataggtgaaagcaacacaaattttcctcatagaatgaataaataaataaaatttgtaatataaaactaatggaatattacttagcttttaaaggcagaaaatcttgtaccatccacaataaagaggaatcttgagaacataatgctaagtaaaattagtcacaataaaacagatactctatgattctacttatatgtaatatctaaagtattgaaacttagaaccagaaaatagaatgatttttatcaggagccaggtggtaaggacaatgggtagttgtcatttcatgtgtactgagttttagttttgcaaaagaaaaaattttacaaatatgttgcttaacaatgtaaatacacttaacatgactgaactgtataagaaaaaatattaaagattctaaattttatgttatgtatttttaccacaatcgaaattaaaaatgacacccaagggccaagagtgatcactcatgcctgtaatcgcagcactctgggaggctgaggcatgcaggttacttgaggccataagttcaagaccagcctggccaacatggtgaaaccccagcttcatgaaaaatacaaaaattagccaggcgcggtggtgcagaactttaatgccagctactcaagaggcagcagctggagaattgctttaacctgggaggtggaggttgcagtgatccaagattgtgccactgcactttggcaacagggtgagagtctgtcaaaagaaaaaaaaaaaaaaaaaaagacacccgaagggagagagttacaaagtttctgaaaaattatcttcaaatcacataaatctttccttcacactaagataatataaacaatagatgttgaaattaagacaatttccatgattactcacttagacagaataaattattggccatcaaataagaagaaaatataaaagtcataaacaaaataggggcaatatttatacaggcaaacaaacagttaaatcattgtattaacaaaagacatagggatggttcatatttgacttctgccccacactgtcttaatgcatacagagttgaatattgttatacaatattatattatacaaattaaaacttaaaacaataaactaatataaggtgccctaccctaaaacatgaaacacagaaatgtaaaattgcaaaacaaagttaaaataaacattaacccccaaattcttatttgaataatgaaattcaaaatcataataaataggtagaaagtaaaaacacaattaactgatgtgagacagcctactctaaaaaatacagaaacataaaattataaaacataattaagagaaactttaatccataaaatcctgaataaacatagtgtccaaatgaaaaagaatcccaggtaactacaatttttaactcttcctgtgaatctatgaaaagtatgaattttgaattatttggatacagttagggcaacaacatttcagagaaaacacattataattaatacaaagagctgtgatgagaaagttttaaggaataagcatttaagtaatactagagaaagttttaaattatgctactgatgcattgctgcttttcttacacaaaacgataaggctgtaatctagcttttaattgaaaagtcttacatttctaaatatggtaacaatataaatattgtaaatacagtataaaacattgacatataaaataaaaattggaaataaattgtactattagtcaaataaaagttgggaaaactggaagaagatgctaatagtaacattgtgcctagagtcaattaaacatacaagccaaatattttaataaattataaattatataatttatacataatatatacatttgagcatgctattttacaacttctgaaaggaaattacagacaaatgtgacacatgataattcagaaagtgaaaacacagtcatagtaatcttcatattaaagaagacagaatcataaaatactaagtgagaaataaagtaataattgtgaattcaatatatgttgaacaatattctaatttcccttacggaaaaagtttttgtaagaaatcagtaaaatgagtacatacaataaaccatcctacagtagaggctgttggcatatagagtttacatttctatgattaggtcctactaagaaaaaggaaattttaaaataaaatacttagattttcctatttaataagataatttttgcctataaagtttttcagtctaattttcttgtagaattaggttttagccatcgtaaaacttgacattatgaagcagaaaacaggtgtcatctgtctctggtgttcctggaatttctaacccaaatgccaattcctccacaactcccttcacacacttctgaattgaagcacaacagatttattaaaattggcataacagcggtctccagaaatgtgcagagattttcccagatccccaaaatcaatgacaaactattcagatcatttaggttctcacaagattctgggaggactttggctttcagtgtgaacgcactggaagattctaagagagagggagagagagagaatgtgtgtgtgttgaaatcagaaccccaccttatgtgtttattgtggaaattgaaaatgaaagcctaaagttgaaaattaaaatcacacatgatagcacgttgcaaactgttttctgtgctagatgggtcgttctagggtgtaggaccctggaaacaccgttttcccctccttccggaaagagctactcacactgctcaaagcctgcatccacatgtaccatgtcgaagaccagctcaagagcctggacccatatgccaccttcagcagggttgactgcagcttcttgttcttcctgagcatcttctccaatggtgacctgagagttgcgggaggcattggggccaggattgaacagaggaaaaaggagcacggaggccaggtgctgaggaccaggccatctcacctggagagttctggccctgagacatccagaccagcatgatgtttaggtgcagacagctggccctgggtggccctgtgctgatcaccggcctcagcccctcaaacagtgggaaatggaagaatggcttggaaatgggccctgtcgacagtgtgtcacctgagcacattctcccaggggcccaagaggggccatcgtgtctctagaaccagaactggaaggtgaaactgccagggggaacaaggaagagggtcctcagttgggtggagggtctcacagcaagacgcctggcttaatcaagcttggccattcctgaagcacgttcagtgactaaaagtgcctaccatgagcagctggaacacactctctgagagctgcaagatgcatggggacctcaagtacctgtttgtaattacagccaaggaccagcaggcagcattgctgcatccacatgggcttttgctggaaccagtaagtctctgccagcccctcccaggctcctgggatgccacttgttctgggtctgtggacagataaccaggacacttactcagtgaagcccatcgctcaaccccagccccaccataccctgtctcctatgccattcctcatcccagaaggaaaggcaatgcctttgtcccacagcccctgccttgtgtcatctcatgtgggggtatggaatgaacccgtcagcctaaactccagtccttctgcctgaggaatctgtccccgctgtcttagtcgccctctagggagctgtcagtgggataaagagcagccctggaagagaggcccaccttcttctgtttgacttcaggacagcctttcagggcaagaacccagagcagatggaggcctcacagaaggctgtggcagggctctcggcttggtgggctaagcatctccctctctgatgactgccatggggcccacaaccactcattcaagagggtcaccaccacattgcaggtgttcagctggacggttccccaggcagagcctgccatggactgcatacacacagaggatgcacaccttgaagttggacaatgaggagaacattcctgaagaggtgcatgcagcctggccctgccctcactgggaacccccttccatctgggtactagacagaattctgtgcacttttctggaggctccatgctggtctgttcatttggaagtttgatgctgtccgtgaggaagtaacaaaagagatatctcagagcaggttgtggggcacaggctgagagattttctccctccctagtccctctgcagacacggggctggaacaagaacctgtggataatgagggaacttctcttcgagaaccggcctgagcagctgcttcaagaaagagccacattaaagtgcctatagcccctgatgagggaatggtagcctcaggcccgcctgccatgtgtgagcaggttttcttgctatcaggatgaaagcaaagaaagctggaatgagcccagccctctcaggcaccttgaagactgttggggttccttccagcccttctagccttatgctttttggcaggccactcaggcacctttttccagcctctgagacttccatgctctggaaggagagggtcccacttttcactaggctatggggccaggcccatccagctcccggcttccactaacaaccatggggctctcacctgggcacacactgcccaaacatggaccttctaaggcagaagatcatgtgtcttgcagttccagctttctagggcttaaaagttatcagtgctgttattaagatagggaagtgagaaaggaaaacttgctgtaaaagtttcccataatcttaccacggagatcatcagcacagatgacagcacaggtagggctgctggggaggctgaaggagagtgtccagcctgttctgccagctggtccttgccaggggtgtctcgtgacccagtcccttagagaagcatgcagatatctcagcaagtatctggaaggtgcagatcagggcaacccagcactactgatggtggagtgggcctacctcccatcaagctgtgtctccacagctgacccttgtaaccaggaggtgttttacaacatgtgcaaggcagtgagctccatcagctgtgtggcattcaacactcacttcaactcggacatctcaccagaaagcagtggggactggccaatgcagaagcctgcaaagtggaacagagcgtcatggggtgggggatgtggggcctgcctgctcatctgagcactgctccctgagggtgtgatctgcaggcttcctgaaggagggctgtgagctcttctgcgaggccctgagcctgtggaacatagctgaggccaagcccatggggatttgtgtctacttgcacctccttgctcatctcagtacactacaggtgactgtgccgaggtgggccttgagcatcccctgggctgtgtcagcaaatggctctgggcctggcctggcattgagggatggcaaaaaaggagcctggggttgcattgtcatcccctatggtagcataaaatgagagagtccagacctgcaggactggaaccctaacaaaggggttaggagactgctcactttccctcaggaacccatgtggaggagctgagggaggttaaggagaccctagggactcacttgttctgtctgggcttccccctgctccatcgtttgatgaccattttctgggaagagctcaggaacctcctgtgctctagtgagacggggcctcccctcacagggtattctgagactgtgagtgagaagctaacacagtgccttgcaatactcatgggagctgtcatcctctgtgaccatcacgtggccttgtagtgttcagactgcctggcctgcctggggtttggtgaggctgttttgtggtcaggtgctttagaagctcactttctctgcaatcaaacagtgactgttttcatgtctgtttatgggtttaaaaaatcctaatatttcctttatagtagttcaccttgtatgtgtttatttgtataaattttattagagtaaagagagcttaagacaatagcattttaaggtcttaatgaggcatagactttcatgtcacaacagctaatgttgacctccttttgctgcctttgtgtaaattacacataaaaagtgcagccagaggtgactagagctgagctgcttgggcttgcttgctggcctgcagtcaggtggactctggctgtgaggcagtgcccaccctggatctacatcccccaccccctctccttagtccctgagtaaccaacaaggccgtgctaatgagagggcgagtgatgggcatcgggcacccccatattatccgggaagatttgaatgccatctgggctggagctgttgggattaggggctgaggctgtcttggcttgtcatggtgccacccacagatgtgcctgccctgtgctgcttctccagaagccggctgcccatggccctgagcctgtcacaccatgcttgctacctcatgctgcttgtgtttgaaaaacccatcccgagatgacgctgctggatgtaagtcctgaaaagggggcatcacctttgtcctgggggattaggagctgaccagattcctcttgactccctcccagaacaagtggggcaggtgctgcaattaatgttgccccctagaagatgtgtttgcactggctgagcaaatatacgatgcagagacctaaatgaagacacgtgaatggggtgtgtggacatcagttagtagctgggaaacaggtgcctctcaggcgtctcgtgttccagcaagtgtggaatatgcctgtgcccatgagtgtagacatctgaagtgtatacatttggctgctgcttttgctgccactattcccaggcccaacctggcttaaagtccaggttttaagtaaaaagtaggaggctttttgccatacagctacttgagaggctgaggtgaaagcatcactggagcctaagagattgaggctgcagtgacccatgattcagccactgcactgacacagtgagacctgcgtgtgcccttctacagagaatagctctggggcatttggggatccctacagtcccggaccctccctgtcccctgctgcctgtgctcctttccttgcctgctgtcagagcctaacatggaggcggttgccaccctgtgagcctgagggagctgtgtctgactggaacttctgtctgaggttttgcgaagtcttacttatgaatatggtctgtccagataccttgtttcaaaggaagtgagcatgagctagcaagtgtagccaccccacagctgataaacaactttgtcttgtttttaaatcatcaatcttcatttcacattggaataaagtaagtgaaacctgctacccgagcctcgcccgtgtgttctgtaacccagactcatgtggttgtgtgggctgttgtcagaaatgttataaaaaggttatgcataaattagatcaaatataaaattatgcttataatgtcacttgagtgggaggtaagagggtagagtcacaggaaatctgttggggtttacacccctgctacttaccaagctcatgagagtgtggcactggtgaccatcacctgacattggtgacagaagagaaaaggtcgaagtgaaggccaggtaggagagaggtgccaggctgtggggccaggccctgcgcatgctgggcctgttaggtcactgaacatctaactacccgggaaccagctcttttcacatcatttgaggtaagacgatgggggagcactctccagaagtcacactgcgctgggagaatggaggagagtctacataccgccatcttagggtaggttttagattgagctgaactgtcttggagagctaatgagatgggaggaagacagtcccccaggtgcacctaacagccagagcctatgaagttaggggggttgtgtgggggtggcctttccctataagaggaggagcttaaagctcttaaagctggtggctgctgctctgccatccctctacagagcagtcaagtcctcagctgcaagaatatctgaatgtcttttggagtgttagagtcctctgtgtcttagaaattttgaaaagaaaaacaaatctcaatattaatgttgattagtttctctgagccaattggggaaaataaacgtccttcacctcaaaggtttaagtgacaccgaagggtagccaccagtgtctcggccactgaagcctcatgcatgctctcactaccagtttgatttgcagccccatagttgtgttgtactaaatattctttcctctggccttgtccagtgaacacggttcacatggctaacaccacttcttgagatgcgagcaccatgcaaagctgagaacggattgggttttgtgaccattgtgcctcctcctcacctgagaggcccatttttcctggttgattcattaagtgtattggtgctgtcagtcgcctctggacaattgaaatgacaagtggctgttgattcataaagaaaatgaaggctttagatgtgaaaccctcgttttctcttgtccttctcttaggtgaaagattttatttttttcaaaaggctacatactggtatcccagcaggtgtagtgtgagaactggcatatgttaggctatggtgtcagtgtggatgggcaattcttcaagatggaaaaccaagtctcactgagttgctggagccacactgacctttctccacatcccccaccatgggctttcacttttatcctgtgcttgaatttttttcacatacaaattctttatacacacacacagacacacacacacatatctcactctgtcaatgcagtggctgaatcatgggtcactgcatcttcaaattcttaggctccagtgatgctttcaaatcagcctctcaagtagctgggactacaggcatgcaaagctacacccagacaatttttaaatatttttctagagactgagcctacttatgttgctcagactcgtcttgcactcctgggatcaaacgataatcccaccttgaccacccaaagtgtttagattacaggtgtgagctagcactctcagcaaaaatatattttaaagaaccgttacaaccaaattatgagttatcattatgccactgccctccaccctgggcaccagaacaagaccttgtatccaaaaactaagcaaaactaaacaagaacaaaaaaaaaaaaacttataaataaactttgaagattgtgtcatctgtgtccttccctgccctccaagctatcaatgttaaatataatggttattgagaaaatggttagatattattaagaaatttctatatatcttccagctgagaataggtattctgttgtggcccaaatattttctcaccgctaccttcagggtctaaactagcaaatcaggacacctgcagaggacagttggccgttttcaaatagaaagagaaatacccccgttcatgagagtaatccagtgattttcaaaaagacaagtcagactgacatgcagcgcagtcaggccacaattaccctggaataatcacttcacacagaatggttgaggagactttctaagatgagcaaatttgggcagcataatccttgcttatttattcccagcccccactgcccgcctgattcctaatggctaccctacaatgtggtcagcagtgggatgtagcgtggtgagagaggggctcagggacgggatgaaggtctttcctgcattatcaaaatgcaggttaaaaagttgttaaaaagatgtccaaatgttctaattcctactgttaaatagctgctaagatgcattatacaacagacccaggtaagggaaggagcatgtgcatttcaagtctcagctcacttcttaattagctgtgatactctgggcaggtgaccccaactatacgagcctgtgtgcctgtcaacccaaaacaatcctaagcaaaaacaccaaagcttggggcatcttgctacccgacttcaaactatactacaaggctgcagtaaccaaaacagcacagtactaataccaaaacagatatatagaccaatggaacagaacagaggcctcagtaataacatcacacatctacaaccatctgatctctaacaaacctgacaaaaacaagcaatggagaaagatttactacttaccaaatggtgctgaaagaactggctagccacattcagaaaacagaaactggaccccttctttacatcttatacaaacattatctcaagatggattaaagtcttaaatataaaacaccaaaccacaaaaaccctagaagaaaacctaggcaataccattcaggacataggcatgagcaaagacttcaggaataaaataccaaaagcaatcacaacaaaagctaaaattgacaaatgagatctaattaaactaacgagcttctgcacagcaaaagaatctatcatcagagtgaccaggcaacctacagaatgacagaaaatttttgcaatctatccatgtgtcagaggtctaatatccagaatctacaaggaacttaatttcacacacacacaaaaaaaaaacatcaaaaagtgagtaaagaatatgaacagactattctcaaaagaagacatttggctgggcgtggttgatcaagcctgtaatcccagcactttcagccatggaggcaggtggatcatgaggtcaggtgttcaagactagcctgggcaacatggtgaaaccatgtctctactaaaaacacaaaaaattagcatggtgttttggcgggtggctgtgattccagcttcttgggaggataaggcaggagaatcacttgaacctgggtggcagatgttgcagtgagctgagatcctgccactgcactccagcctgggtgacagagctagactccgtctttaaaataataataaataaaataaataaaaagaaaaggaagaaggagaagaagaagaggaagaagaagaagaagaagaagaagaagaagaagaagaagaagaagaagaagaagaagaagaagaagaagacatttatgtggtcaacaaacacacaaaaaggaaaaagaaaaaagctcatcatcactgatgattagagaaatgcaaatcaaaaccacaatgggataccatctcacaccatttggaatggcagttattaaaatgtcaggaacaacagatgctgatgaggctatggagaaatagaaacgcttttacactgctgggggcgggagtgtaaattacttcaaccattatggaagacagtgtggtgattccctaagtatctagaaccagaaataccatttgacccagcaatctcattactggttatatacccaaaggaatataaatcattctagcataaagacacatgcactcatatatctattgcagcactgtttacaataacaaagacttggaaccaacctaatgcccatcattgatagactggaaaaagaaaatgtggcacatatacaccatgaaataatattcagccataaaaagaatgagttcatgtcctttgcagggacgtgaatgacactggaaaccattctcttcagcaaactaacacgggaacaggaaacagaacaccatatgttctcactcatatgtgggagttgaacaatgagaacacatggacaccgggaacaaaacatcacacactggggcctgttagggtgttgaggtcaaggggagggagaaaattaggacaaatacctaatgcatatggggcttaaatcctagacgtcaggttgatagaagcagcaaaccaccatggcacatgtaaacctatgtaacaaacctgcacgttctgcacatgtattccagaacttaaagtaaaacaaactaacaaaaatgcactaaggctgagggggagtgggggtaggggcaggagtcaggcgggggtgggtgagtcctggagttttatccagtcattgacactgatgtgggaacagcccaatcaggcgcgcagttggagaggacaggagaggagggcgtggcttctggcgtttggcgggtctttgtctcttgctggcgctggcacaggaacttgggatccgtctcctctttcgcctcctccgctttgggagccccgggctactctttcacagcccctgttgccctgtgatctgtaggtccttggggacgcacagttaagatgacaggacatcctggaagctgggaaatggtgagtatacggggttcggcatcccgagaggggacagcaggctgtgaaaccggcaggaccggcccccacggttagctccgagtctcccgcagcttggccctcagtcccctgtggctgcaagatggccgctgggccagcatcgaggacccccacatccggcctggcccatccggtgctgtccctgggcagcgccctgctctgcgcccacagccatgagtatttcccagattgttcagggaggcctggtgggtcatcagggaaaaactgccactgggtgtttgcgtgggaggagctgcggcccgtggggtccccagtctctcttgttaaaaattaacgggagtctatgttaaaacgttaaccagtttatctgaacaaacagtgattggtgaaatggaaagcacccagccatgatttctggtccaccagaggggcataaaggaaaggctttcataagatgcatgagaaagcagcccaaattcaaaaattggttccagttatgtagtcaccttatttgaactatccagatggaaatgtcctggttacatattcagaggttaattgcatgtttgccattggttaaacgtgcattttgtttcaggctaagataatgctttataggaaatgtatttgagttaggttttagtttttgtttttttttttttaacctatgaacccaggacactagagccactttagtctaattttctgctctttaattattttaacactccagaggaggactggttttctcctgtgtttttttaatatatggcaagtggaacctctaatcgaccaccctgtttttcagcctaactcaggcttgtggtaaaattatcagttcccactttctttgctgcattctcaaatgcaacacaggagaacagctttcccttgcaaattcacaatgctgttaactatttgtcctttattatacatttcattaaagttttctattattggatttctttctacttctccctacagttctgcccatatttgctttttatatttagaagcctcccttttgggtgcataaatatatatagctatattcacttgacaaattaacctctattattattgtatggtaaactcatttcatgcttgtgagagacattgctagaaagtctattttgtctaatttaagcataactaccattgaactcctttggctattatttgcatggaatatcattttctatcctttcacttttagcctatgctcttaattcataattgagtctcttgtaagcagcatattacgaggtttaaaagtttcatttatccactctgtctgctttagtctcttttggctgttataacagaatatcacagactggtaattaataaagaacagaattttatttgactcatgattctggaggctgggaaggtaaaagaacatgttactggtatctgttgaaggtctagttgctggataataacatggccaaagatgtgagggagagacagcttttttttttttaatatataacagatccattcttgttaaaattagcccattcccataataagaacattaatccattcatgagggcagagtgcttatagcttaattaatttttaaaggttccacctcttaattctttcacattggccattttatcctaaattttggagatgacattcagtctacagaagtatctgtttagtagataatttaatctttttatttgtaaggtagtgataggtaagcagttactattgtacatttgtagttttctgtccattttaagtttgcttcttttttttctggttctgtctttcctgtggtattgttcatttttgttgagacaaagttatgctttcttgctcagactgaagttcagtggcatatcacagctcactgtagcctcaatctcctgggctcaagcaatcctccccccttagccacccaagtagcttggactacttggacatgtaccacaacacccaaggagcttatgattcttccaccttggcctccaaaagtgttggaattataagcaggagccactgtatccaatgtgtaatttttgttgtttgtgtatgctttaattactttctctttttctttactatgtttttttttcccccagtggttatcatgagacttatgtaaaacctcttgtattttaatagtctagtttaagatgataacaatttagagtattctgaatttcagtatgtatttaccatttttagtgacatttatactttagtatttttcatattgttagttagcatttcatcatatcaatgtgaagatttcttccagaccttggctggagaaggaaagaaggtgtgttttgcctgattcagggactatagagagaaccaagttctgcaggcctgtcacctaagtctcagatgagtatgaattcttttgtgtttttcacagatttttgcagtggcaggaccaagttcaaatgagtcatagccaagtttacagtaagatgtggtagtattctgttttgaaccgaggaccatgattggcaagcttgccacttggtcaagtgcttaccctctaaagatgtcttccttggtctttgcctccagctgggtgtcacaaactctgaactggattctaaggctttcatgaatgcacttatgtttcccgtggcagctgcattatgttgtgggggatgtgcatgccgaacctcccattctgtcgtcttgcttatgttactctcctttatgtttcactttctcaaatgaatgtcaagctggtgatttttagattcaaaaattctaaaataaattgctcaaatttccacattatgtaagctattaataaaatgtcttgtaggtgctacatatttattaaaatttttggttgtaattttaagctcactgcaggcagaaaggaatcattaacatttatattcttttttttagtctgtatctaaatgatggtatattttaattccagatatttactttatactgcagtaatgctcgtcatattttgcaaaatttatgttgttcttttatttggaaatataaggcttttttagctcttgaaatctatattatagtcatataattttattatgttttgtggtaagaagtgcagcaacatattgagaacataataaaattatcctgtatttttaatgattatttattaaattcctctcattagagcctgttattaatgattgtaatgtattttctgtataattttactgcaatttattaaattctaatgacttaaattgtctgcttttcatgagtgcacacagttgaatgctgtagatatctaaagaattatttttcggccggttgtggtggctcatgcctgtattcccagcaccttgggaggccaaggcgggtggatcacgaggtcaggagatcgagacaaccctgactaacatggtgaaaccccgtctctactaaatatacaaaaaattagccgggcatagtggcaggcgcctgtatccccagctactcaggaggctgaggcaggagaatggcgtgaactcagtggacagagtttgcagtgagccgagatcgcgccactgcactccagcctgggcaacagggcaagactctgtctcaaaaaaaaaaataaaaaaaaaaacggttattttccattgtaaatctatgttgtattcaggattttatgcacgaaaatctctcttcttattttcaagtccgtgttattgtgtttcttttcttgggagttatgttttctcagatcagttaaatgtatttttattttaaagcttgatatcatcagttgaaagataatttttagctcggtacactttatctcaatgtgatgtttaatatatgtgtgaattagctgtgtttgttgcttatagatatatctgtatgtttttcacttatgtaagtatgacatctttttccttgtttttttgtttttttcttttcagtttcagataggctttttttttttttaagagaattttaaaacagagtcgaaagaagagaaatcagttatttgtcctcttgcagggtggggagacaacttccttccccacaggtttgaggctatgcctaagtggtgagtcttgaggagatgcagaaaggatccatcccaggcacttggctggacttaagtaagcatagcctttaggccacaagacctgatggtttgggtactggtctggacataagtccccatcttcccagaaatatcatcttttgtctgcaacaactggctggagaaatatttcagaaagatgtgtgtctggaacacccaaagacatacttttcctttctccttggcataggccttgcagcactgaagaaagaccaggtttgcaatggagccttcaacagtcttcatccctatggaactcagggtctcatagggtgacaggagaggagacaaagctaacttgggaagagtctctgtccttcagcttctcccctactgaaacactatatattgggcccacagttcatcacaaaacacacatgctctctttctttctctcacacccaatcttgggaacccaaaaacttgatggcaggtagctctgggtatccttggtctggcattcacccactgggaatctaagctgtcctaaagctcttttcaatcacttctcactgtttccaggcccatgtgggtaggtgttccaggcttcattctttcaggctgatcataaaggcacagtgtgggaaaatcccctactgtgatggccattgctgggaagcaggaaaggctaagggcccactgctgcccaaggctagtatagatgccctctgctccactcatgtcctcaaagactgatatcaggtgcagcagctgctgtctggaatgttatcaaaccaggactgcacaggcactgcattctctgtgtggaagacgtaagaagcaggcgagttgtccaggatgagagttttcctcaggtccctccccagatggctgaggtcattgacatagcagccctggtggaacaaacgtgactcatgggctaggcaaccccagaacacctcacactggtccagcacacccatcacaatgtgtctggaattggtgggttcttgttctcactgacttcaagaatgaagccacagaccctcacggtgagtgttacagttcttaaaggtggcatgtctggagtttgttccttctgacattcggatgtgttgagagtttcttccctctggtgggctcgtggtctcgctggctcaggagtgaagctgcagacgttcgcggtgagtgttacagctcttaaggtggcacatctggagttgttcattcctccaggtgggttcgtggtctcgctggcttcaggagtgaagttgtggaccttcacagtgagtgttacagctcataaaggcattgtggacccaaagagtgagcagcagcaatatttattgcaaagagcaaaagaacaaagcttccacagtgtggaaggggacccgagtgggttgccactgctggctggggcagcctacttttattcccttatctggccccacccacatcttgctgattgttagagccgagtggtcttttttcacagggcgctgattggtgtgtttacaatccctgagctagacacaaaggttctccacatccccaccagtgtagctagatacagagtgttgattggtgcattcacaaaccctgagctagacacagggtgctgattggcatgtttacaaaccttgagctagatacagagtgccgattggtgtatttacaatccctgagctagacacaaagtttctccacgtccctaccagactcaggagcccagctggcttcacccagtggatcccccacagggtctgcaggtgtagctgcctgccagtctggcactgtgcacccgcacttctcagcccttgggtggttgatgggactgggtgccgtggagcagggggcgacactcatccaggaggcttgggcacacaggagcccaccgatgggggggaggctcaggcatggcgggctgcaggacccaagccctgccctgtgggatggcagctaaggcccagcgacaaattgagcacagcagctgctggccgaggtgttaagcccctcactgcctggggccggtggggccagccggcggctccgagtgtggggtccgccgagctcgcgctggccttcaagcactgcacgccgccctggttcccacacgcacctctccctccacacctcgtcgcaagctgagggagccggctccgaccttggccagcccagaaaggggctcccacagtgcagcgacaggctgaagggctcctaaagtgccgccaaagttggagcccaggcagaggaggcccggagagtgagcaagggttgtgaggactgccagcacgctgtcacctctcaacaggatctgcatacttgttcagtctggaatgaagagagcaatgaagaaaacacatttaaacagttcctccagtcatctcaggaactcatccatataaggcctcatggtcccctcaatctttacagtcactaggcagtcagcattgctgattggcttaatggagctatgcacaagggtttcatccatgtcagtgaccatacagatcgttccttgatttttctctgtcacctctgggagcaggcaggtccctgggatctgataaaactgatactggagacacttgagctgatccgacttagcaatggtgttgactccctccttatgtgtggagaactcagtgggggaacttgacttgccaacatgctgggtgcaagaacagcagaaaggtaccttctaagatgtcacaaacatgaggcctcttcggagagcactttggaaaccaggccttgcttgctaaggaccagggcatcttccctccatgcctgggtggtgatggagcctggttccatctaacaatcctgagggctcggctggctgggtgggaagacagcgggcacgttggctggactgggctggggggcatgggctggggcctgattcagttcccgagagtctgacttccacagctgttcacataccccttctcctttccatcacaggccgggaagagaggcggcctgtagggacggtggatggccttggcagcagctccccagggtgcccccagccccaaatcccccagcaggagcttcaggatcttcagtttgggtctaacctagggaatccacctcatactcatgttttttcaagttttattttaagttcagtggtccatatgtgataagcttttttttcaacttttattttaagtttaggggtccatgtgcaggatatgcaggtctcttacatagataaacgtgtgccattgtgctttactgcacagatcatctcatcacccaggtactaagcccagcatccgcagctattcttcctgctgctctccttcccctcccccatgccatgaaacaggtgtccagtgtgtgttgttcttcctgatgtgtccatgtgttctcattgatctgcttctgctaataagttagaataataataggtggtgtttggttttctgttcctgcattagtttgctgggagtaatggcttcaaattccaaccatgtccctgcaaaggacatcatctcattacattttatggcttcatagtgttccatggtgtatgtgtaccacattttctttatccagtatatcattgatgggcatgtagattgattacatgacgttgctattgtaaatattgctgcaatgaacatatgtatacatgtttatttaaaatagatttatattcctttgggtgtatgcccagtaatagtattgctgggtcaaatggtatttctgcttctaggtctttgaggaatctccacactctcttccacaatgcttgaaataatttacaatcccaccaacagtgtaaaagtgttcccttttctccacaacctcaccagcatctgtttttatttcttttttactttttattaatagacattgtaattggtgtgagatggtatctcattgttgttttgatgtgtatttatccagttatcagtgatgttgagctttccatgtttgttgggcacatgtatgtcttcttttgagatatgtctgttcatgtcctttgaccactttttaatggggttgtttgtttttctcttgtaaattttaagtccctcatagattctgggtattagatatttgtcagatgaataggttgcaaaatttttctcccattctctagcttctctgctctgatgatagcttctttggctctgtggaatctctttagtttaattagaccccattagtcaatttttgcttttgttgctatttcttttggtctttttgtcatcaaatctttcctcatgactatatcctgaatggtattttctagattttttcttctaaggtttttatagttttgggttttacattcaagtctttaatccatcttgagtcaatttttgtctatggtgttaggaagggttccagtcttaattctctgcacatgactagccagttatcctagcactatttattgaatagggagacttttccctaattccttgtttttgttgactttgtcaaagatcagtttgttgtaggtttttggctttatttctatgctctctattttgtttcatttgtctatgtgtctgtttctataccagtaccatgctgtttttgttactgtactcttctagtacagtttgaagttaggcaatgaccctttcagcttttttttttttttttcttaaggttggcttggctatttgggctcttttttggttccattttaattttaaaaagttttttttttctaattatctgaagaatgtcagtagttcaatgggaacagcattgaatctataaattacttagggcaatatgctcatattcgtggtactgattctttctctccgtgagcatggaatgtttctccatttgttttgtgtccactctgattcctctgagtagttgtttgtagttctccttgaagatatccttcactttccttcttagctgtattccttggtatttttttctctttatagcaaatgtgaatgaaagttcattcatgatttgtctccctgcttgcctgttgcttgtgtatgggaatgctagctacttttgcagattgattttatatcctgagattttgctactgctgcttatcaccttaagaagctttggggctgagacgaagaggctttctagatatagggtcaggtcatctgtaaacaaagataatttgactttctctctttctatttgaatactgtttatttcttcctctggcctgattttcctggacaagttttccgaatgggagttgtaatgcgagtggtgagagagagcatacttttcttgtgccggttttcagggggaatgtttccagcttttgcatattcagtatgatattggctgtgggtttgttgtatatggctcttcttattttgaggtatgtttcttcagttcctaatttattgagaattttaaacgtgaaggaatgttgaattttattgggtgctttttctgcatctattgaggtaatcatgtggtttttttatttagttttctttatgtgatgagtcacatttgttgatttgcatatgttgaatcaaccttgcatcctggagacaaagccaattccattgtggtggatgcactttttaatgtgctgctgggtttggtttgccagtattttattgaggatgtttgcacagtgttcatcaaagacattggcatgatgtgttgttgttgttgttgttgtatctatgttaggttttggtatcaggatgatgctggcctgatagaatgagttagacagaacttctttgtcttcaattttttttggatagttttaggagaaaatgtactatctcctctttacctcaagtcaaattcagcttgcttggtaggctagttcttactgtctcaatttcagaacacattattgatctattcagggttcagtcttgtagagagtttattttgcaaggaaattgtccatttcttctagattttctggtttatgagcatagaggtgtttatagtattctctgatcgttgttcttatttccatgggatcagtgatgatatctcccttattatttctatttgtgtttggttctttcttttcttatttatttgcctaactagtgttccatctagtttataaatttttttttttttcataaaaacagctcctggattggttgagttttttttttttttttttggaagagttctcagtgtctctatctccttcagctctactctgatcttggctatttcttatcttctgctagctttcaggtttgttttcacttggttttcttgttcttttaaccaagatgttaggctgttaactttagatctttctaatttttttttttcttgtgggagagtttcactctgtcacccaggctggagtacagtggcataatctcggctcactgcaacctccacttctcggttttaagtcacttctgctgtctcagcctcctgagtagctgggattacagatgtgaatcaccacacctagctaatttttgtatttttttgtagagatatggttttgctgttggccaggctggtcctgaacacctggtctcaagtgatctgcctaccccagcctcccaaagtgctggaattacaggcatgagccaccatgaccggccctttctagctttttgatgtggacattagtgctataaatttccctcttttcttggtttctagtgattattttattctatcttggtgagtagtcagggaaataatcttaaatttacaatcaacttatagtttaaatctaaataattaagtgagaagaaccctttgttatttgaaggggatgtttgaagattttgtaaccgtgccttttaggtagtcctaaatttctaattgtagttaaaaacatgccattttcatttctaacattttaagtatatggtttagaagtggtaagtatagttctatttttttttgcaataggttttagataatttttgtcttacaaaagtaaaagtgaatactcattaattctgaaacaagttagttagcttgctttagttagatagcaagagaagggtccctggaaagtccctggcccttgggtcagtgtctcatccctgcataatataaaaggaatcctggaaaaaatcaagctgcagacactaacaaggtaactagcacatggtgttgtgcttggagacctgcccatggctgcacagacagaaaaacctctggcatatttggataaaaacttgtacaaacctccagctcactgagataagggaacaagaccgacctggcatagaaatgcctttgtttgtccaggcacagtggctcatgcccgtaattccagcaatttgggaggcagaagtgggcggatcacctgaggtcgggagttcgagaccagcatgaccaacatggagaaaaatacaaaattagccgggcatggtgcctcatgcctgtaatcccagctacttgggaggctgaggcaggagaatcacttaaacccaggtggcggagtttgctgtgggccgagatcgcaccattgcactccagcctgggcaacaagagcaaaactacgtctcaaaataaataaattaataaataataagaaagtacatctcaaaaacaaaaatgaaagaaagaaagaaaagaaaaagaaaaaaagaaacgcctttgtactttgtgcagtcagtgggctcccaggaaaatgtttcttctccttttgtgggcataagcacagtgggctctggtgcattccggtcgacactctcctttatttggactgtaagtcagacctctgtgaataattacttcagcccctgattgctcccgggacaagctcctgcgccaagctttcactttagcttctgataagtcctgggccaatctaaatagcatctatgaatcatcccttcagctcctgattggtcccgggtcaaagtcctgggccaagctgagccacacttttttcaagacagcctgttaactaggcacatttccttctcttcctttcccagtccataaaaaccttgggccccagcctcacagaggtcaccccattcagaaactatctctgctggcaaagagctttcttctcttgcttatcaaactttcactctaacctcacctttgtgttcacgctccttaatctccctagaagtagaacaaagaactttcgatgctatctcagactatgagagactgttacatcttggtgcactgctgagactacaacacttggtttctttgagtttgactaaatattttacataggtgtaattatacagttttcctttttgactgtcttgttttacttaacagaatgttttcgagatttgtccttattgtagtacttttcaagatttccttatttttaaggctgaatgctatccagtgaatatacgtgccctgtttgttgaatctactcatccttaaaggtacatttgcttccaggtagtatgtttgtgagtaatgctacagtgtacataaatgtgcatatatctattccatgttctgctttgcctgtttgggatatttttcacacactgatttagtaccatgtgtattcccttgcttttgttgtctgattcgttgatgttacatcccccaaattattgccgagaccaattgtcatgaagcttcacccttctgtattgtgctaggaattttacagctatagattttacattatagtcttcatattttaaaattgacacatgtaattgtacaaattttggggaaacaattatgtatatatgttgtatagcaataaaaatcagagtacttagtgtaattattgcctcatacatttgttatttttgtggtgagaacattcaaaagcttcttctctagctatttttttatatctttatatattaactttttttagagacaggatcttgctctaacacacagattggagtgcagtggtgcaatcctagctcactgtaacctcaaacaatcttctaacctcagcttcccaattagctgagactacaggaacctgcctccatgcctggataatgttttaatttttcatagagacagggtcacactatgttgtccaggctcatcttgaacttctgacatcaagtgattctcctacctcattctcccaaaatgtatggatggcaggaatgtgccaccacaactggtctcttttagctattttgtaatttgagataacttttcattaattattattattctgctgtgtaacaaaaaacaaaaacttatttctcctatctaattgtaacacaatacttttgaagctgccttttcccatctccctgcttcagtctctgggaacccctgttgtactctttgcttatatcaaccctttttttcaggttcctcaaatgagtgagataataagatcataaagtatttgtgtttctctatgtggcttattttacttaacatggtatgctcaaggttcatccatgctcttttaactgacagaattttatcctttcttatagctgaatagtatttcactgtgcatatatagtacattttccttatccatttatctgttgctgtacatttgaattgattccatatataagctattataactagttctgtaactaacatggaaatgcaaatatctttttgacacagtgatatcctttcttttgtatatacatgcaggagtaaaattgctggatcatgtaatacatctatttttaatttctttcagaaacctccatagtattttctatagtggccatactaatttacaattccaccaacaatgtatacattcactcattttatatcctcattagtacttgttttatttatttatttatttttattatagccattctaaatgggagtgaggcggtacctcattgtggtttggattttcatttccttagtgattagtaatgtagaacatatttttatgttccagttagccatttttgtatcactttttgacaaacatctattaagatcttttgcatttttttaattagattataagtgtattttattttgagattttaaagtttcttatttattctgaatattagccttttgtcatatgtatagcctgaaagcattttcttttattgcctaagctgtctcttcaatcttttagtttttttaatatggaaaagcattttagtttgacataatgttgtttgcttatttttgattttgttgcctatgttttgacatgttattttaataatcctttccccgtcgaatgttataaagcattttttagtttttctctaatagtttcataattgatagcattacatttaagtctttagtttgaattgattttcatatatggcaaggcacaggggtctagtataatttttctgaatttaaatatttaaatggccctgcatcatttattgaagaaattagcttttccctaaagtgtgttcttggcaattttgttgacaatcagttggctttaggtgcataaactaacttctgggcttcttgggcacattagtctatgtgtttgtttttatgccagtacagtgctcttttggttactatagctttgtagcaagttttgaagtttgataaagtgatgcctttagctttgcttattttgctcaaagttatttgtctattcagagttttttgtggatccacataaatttaaaatattttttctatttctgtgaaaaaatgtcattgatattttgataaaaatattacctcccacagggtccctcccaggacatgtggggattattacaatttaagatgagatttgattggggacacagagccaaaccctgtcaattacttaaatccaggagttcgacactaccccgggcaatattgtgacaagctattggtaaaaaatattttcacagattactcaggcattgtggaatgttcctgtagtctcaggaagttggaggctgacgtaagattattccttgagttccccaggaacttgaggctgcattgagctataatcatcgtattgtattcctgtctgggtgagagagtaagacctctttttagaatttcaaatttattttagatttaggaggtacctacacaggttttttacatgggtattttgtataatgctgaggtttgaagtatgagtaattccatcaatcaggtagtgagcatagtactaagtagacagtttttcagttcttggtccctccctctctccaccctctaagagttgtctattatttttgtttttctgtccatgtgtacccagtgttaatttccatttataagtgagaatatgcagtattttcattttccatttctgcattaatttgctttgtataatggcctttagttgtgttaacgttgctgcaaaggaggttttttttgtttgtttttgctaagtagtattgctgtacatgtgacactttttaaattcaatttaccatcaataggctggacatggtggctgatgcctgtaatcccagtgctgtgggaggccaaggcgggtggatcatgaggtcaggagatcgagaccatcctggacaacgtaatgaaaccccgtatgtactggaaatacaaaagttagccaggcttggtggcatgcgcctatagtcccagctactcgggtggctgaggaaggagaattgcttgaacctgggaggtggagattgtagtgagctgagatcgtgccactgcactccagcctgggcaacagagtgagacgtcatctcaaaaaaataaaaaattaccatgaataggcacgtaggttgattcaggtccttcctcttatgaatagtgtagtgatgaaccaacaagtgcatgtgctattttggtagaatagtttattctcttttgggtatatacccagcggtgaaattgctgggttgaatcacagtttaactctcagttatttggaaaatctccaagctgttctccacagtggctgaactaatttacattcctattaacagtgtataagtggttttttccctctaaaaccccatcaacatctattatcattttactttttaacaaaaaccattctaactggtgtacaatggtgtcttattgtggtttttatttacatttccttgatggttagtgatgataagcttttttcatgttatttggccacttgtatgtgttcttttgaagagtgtctgttattgcccactttttcatggggtaattttttccttgtgaattctttaagtttcttatagattctgagtattagattttgtcaggttcataggttatgaatatttttgccattctgctagctttggggtaagttagtttttatttttctagtttctctaagtgtgatgttaaattgttagtttgagatcattctaacttcttgatgcaggtatttagcactctcaactttcctcttaacagagctcttcctacaacccagacattttgttatattgtgtctcttctatttcaaaatctttttaattttctgccttaatttttttgtttatccaaaattcattcaggagcaagttgtttaatttcaatatcattctgtgattttgtgagattttcttggtattgatttttatctttgttccattgtggcctgtcatattctgtgagcagatgagaagaatttactttctttagatgatgtgttgcatatactataaatgtctattagtttcaattgatcaagtgtcgaatcaaactccagaatttctttgttaagtttctgcctagataatctgtcaaacacttagtggggagttgcattcccctactattattgtgtgtctacttgaggcttattgtagttctagcagtaattgttgtataactctatgttccccaaagttgggtgcatctacatttacgatagttaagtcttcttgttgaattgaaccctttatcgttacgcaatacctttctttgttttattttactattaatgatttaaagctattttttcttaaaagagaaacaattccaggtatggtagcttgtgccagcactttcagactgaagcagtcggattgcctgagaccaggagtttgagaccagccgaggcaacacagcaacatactgtttgtacaaatttttttaaagaaactatacaggaggggtaatgtgcacaactgtggtcatatttactcaggagacataggtggcatgactgcttgacttccgaaatttgaggttacagtgagctgtgattccaccagtgtactctgtcccaggagataaagtaagatcctctgcataaaatgaaaaagtaaagaaaaataaaaagattttaagttaaaaaaataattcctagatctccacttctttaggttcacttgaatatatatttttctcctttgattaggttatatttcctggttgcttttacttactgtagttttgttaaggttttgatcaattaagaaaccactacctattttatcctttatgaaagagctttatacatgggaaaattgacaacattcagccacagtagtcatactgggagcttctccaatctgttgtcaaaatgtgtcttctttggactactgtatgtattttcttgttaataaggtttacctctgtttcctcttaggagcctttagtctcttcccttcgtcactgttgtaggcactacagtctctgttgttgtaagaagcatttatctttattctcagttgacccaagctgtcatttaaactcagtctctattctcatcaacactaaatgttaaaggaagcaatttccagtctttagataaccccggtataactcagtaagtcagaagtttgcatacgcatttcactcttttttctttcccaaaggagaatcatggaatggacagatttttatctaactgcgctgttctgtagtgcacaaatgtgaccaaattttcttctaaatgtggttatggttggcttttttctcatgtggggtgctacaaactcaactggctttgttcgcccaattgtagttaagttcatatgtcaatggagagaaacaggatctcaggttctgcttcaactgtcattgtcttctcagctgacctcattttgtacattagatttataaaatatatttactttaatctcatcaccgaatttttaaaaaaattattatttttcagctcttttagcaatatatccaatcaagacccagagaaaacagtacatagaagcttcttttcaaaaagtaatattgggaagatatgggagctctggccttgaacttttacacttaggagagtgggaaattgaaggataagtgtaaacggcacaaagtatgctatgatgaatataccagatacacagcaattacctacagcaaaaatgtcactgctagaagagctcaaaaccataaagtattttggaaaaagcataattaatgttgattcttttttctgaactatatatttatataattacataccaataacaatttttgaaacatatcatgtttttgaaacaaaatttagaaaatcgcaatagtggcctaggccaggaatatttcttctaatgctatccctcccatagtcccccacttcccgacaggctccagtgtgtgatgttccccttcctgtgtccgtgtgttctctttgtttaactccctattatgagtgagaacatgcgatgttagcttttctactcttgtgttagtttgctgagaatggtggtttccagcttcatccatgtccctgcaaaggacatgaactcatcctttttatgactgcatcgtattccatgatgtggacatgccaagttttctttattcagtctatcattgatggtcatttggtttgtttcaaagtttttgctcttgtgaacagtgccataataaacatacgtatgcatgtatctttataatagaataatttataatcctttgggtatatacccagtaatgtgattgctgggtcaaatggtatttctcattgtggatccttgaggaatcaccacactgtcttccacactggttgaactaatttacactctcaccaacagtgtataagtcttcctatttttccacatcctttgttgtttcctgatttttttaatgatcaccattctaacaggtgtgggatggtttctcattgtgtttttgatttgcatgtgtctaataaccagtgatgatgtccttttcttcatttgtttattggctgcataaatgtctccttttgagaagtgtctgttcaaatcctttgcccattttcgatgttgttgtttctttttttcttgtaaatttgtttaagttctttgtagattctacatatcagcccattgtcagacggatagattgcagaaattttctcccattctttaggttgcctgttcactctgatatagttttttttgttgtgcagaagctctttagtttaattatatctcgtttgtcaattttggcttttgttgccattgtttttggtgttgtagtcatgaagtctttgcccatgcctatgtcctgaatggtactgccttggttttcttctggggtttttatggttttaagtcttatgtttaagtctttaatccatcttcagttatgttttgtataacgagtaaggaagaagtccagtttcagttttttgcatatggctagctagttttccaacaccatttattaaatagggaatcctttccccattacttgtttttgtcaggttcatcaaagatcagatgattctagatgttgagtgttatttctgaggcctctgttctgttccatttgtcaatatatctgttttggtacgagtaccatcctgtcttggttactgtggccttttagtatagtttgaagacagctagcatgatgcctccacctttgttctttttgcttagtattgtcttgtctatgcaagaccttttttgattccatatgaaatttgaagtagttttttttctaattctgtgaagaaagtcaatgggagcttgatggggatagcaatgaatttataaattactttgggcaatatggccattttcataatattgattcttcctatccatgagcatggattgttttcgtttgtttgtgtcctctttcatttccttgagcagtggtttgtagttctccttgaagtggtcctttacatcatttttaagttggattcctaggtattttattccctttgtagcaattgtgaatgagagttaacacatgatttggctctctgtttgcctattattgcgtataggaatgcttgtgatttttgaacattgattttgtatcctgagactttgctgaagttgcttatcagtttaaggaaattttgggctgagatggtagggttttctagatatacaatcatgtcatctgcaaacaaagacaatttgacttcttctcttcctatctgaatacgctttatttctttctttcttttgctgattgccagaacttccaatactataatgaataggagtggggagaaagggtgttcttgtcttgtgcaggttttcaaagggaatgcttccagtttttgcccattcagtatgatattagctgtgcatttgtcataaataactcttattatgttgagataggttccatcaatacataattcattgagagtttttaccatgaagaggtgtggaattttattgaaggccttttttgcatctattgagataatcatgtggtttttgtcattagttctgtttatgtgatggattttatttattgatttgcatatgttgaaccagctttgtatcccagggattaagctgactagatcgtggtggataagctttttgatgtgctgctggattcggtttgccagtattttattgaggattttcgcatcgatattcatcagggatatgggcctgaaattttctttttctggtgtgtctttgccaggttttggtttcaggatgatgctggccacataaaatgaattagggaggagtacctctttttctattgtttgaaataatttcagaaggaatggtaccagctcctctttgtacctttggtagaattcggctgtgaatccgtctggtcctggacttctttttgttggtaggctactaattactgcctcaattttagaacttgttattggcctattcaaggattcgacttcctactggtttgcacttgggagggtatatgtgtccaggaatttatccatttcatctagattttctagttaatttgcaaagaggtatttataatattctgtaatgatactttttatttctgtgggatcaacggttatatcccctttatcatttcctattgcatgtatttgattcttttcttccttattagtctggctagaagtttatttattttcttgatcttttaaaaaaaccagctcctggattcattgattttttggacgggctttttgtgtctctatctccttcagttctgctctgatcttaaatcttgtcttctgctagtttttgaatttgtttgctcttgcttccctagtttttttaattgtgatgttacggtgtcgattttagacatttttctgctttctcttgtggggatttagtgctgtaaatttccctttcagactactttagctgtgtcgtattttactttttaagccctcaatcttcctttttcatcgtgatagtctttactgttttatgtttatgtaatgtaaaattgactacacaatttttacaaagattttatgaaaatattttattgagaatgtacaaaccgtcagtcaattagaggagaagttacactgtcataataaatagccacaaagcaaaacgccaaaagacatccaaatcagaataaaacaaaacattttaacaaaaacaaaaagaacaaactggcaacaaatatgtgaagtttatattacaaagatgctcacttatccactctaaagagagcttttagaatttgatttaaaatacggcaaagacattatcccacacttcacagaaaaaataaatttaagcagctgttaacacatgaatgtattatcaagctcagatataatcaaaattaaatatttgacaagagattctacagtttgggagaaatagaagtgtttttttcttttccccaggcccacaagtctagtttcttgttcttcttcactataatggggtttgtcatcagctccccaaaatatgggaagcacagagcaggtggtggctgaaggtggggtatcctgtgaaaccatatttaagatcagagcccttggtccattgtgttgtaatcagctggctcaggaaagaacacctggctgtccagagctctacacctactgcactgggtgtgaaaggaggcctgagaacccatgggtcccaaacccaccccactccaaattatcatccagtattgagaactctgacaccaaattctcacagagcatatgtttatgcagttttacatttaatttctcattacattacaattgggaaactgaggccccagaagaggcagagactggtccagatctcaggaggtgggcaggctccagagcattagagagggctccagcttcctaggccttggcaccgtcccacttatcaggtttgttttcgaaattagagtctgtagctacacattcaggagcacagaaaatgagcagattcagggttctgttcacatggggtcctctccatgtcagtttcaagataacaggactggggttctgcatccagctctgagggcaactggaagtaaaatgagctatgctccacctcagcctaatgtagacagtgcctacaggaaagcttgttttcttcctcataaataggggtgcctgaagtgggtgaccttgatgatttcacatactcataagtgtctgccagcctggattcttgctctgagactgcaaaaatgcacccactctgcagatccttcaaatcagagggaggcatggccacttgagaggcatcttgggtagatgaagatgagacagagttaaatgtgccagagcactggactctgaggctgaggtccacggaaaatctcagctactgttgcgttcttaaggtcctcatttgaaagtggtagaaaataatttcactggataaggggaggatacctcatgagtaaatagcacaaccaaaaaggtggaggcaaagagagggcaaaacgggattcctagttcactcattatacttggggccttcagatcctgctactttatcccctaggaccttgaagaaccagtgtcttgaggacagaaaaatcaaggtatcagatttgttcagtagtgctcctgcttggggctgtagggttagtgatggccaggaggtggttacagcctactgtgtttctggtgcccactgagctttgctggagcagctggaacaagtaacagtcacacacctcatgttgttatcagtgatgtccacattatcaggtggtcaaaaggggaagggatattagggatcccccatataatcacttagccagtcttttttcccttgcgctcaccatttgccagcgaccctggtgggtccaacatgtggtacagaaaattattacttcatgtctgcaccccccaacccaggaccaaacaatctgaggaccgctggacaaaagcactaaagcaagtatatgtgaaagaaaagagcaaggactataatataaagtagattattgagaagaaaacctggaaaattattgcatgggaggacctcaggcctcactgaggtgacttttaatccatgatgaggatgacagcagggaggcatctgcacaagcatgtgtcagggagaagccacccttagtgaaaaaactcataggtgtgagtttggcagaggtaaaaagggactagtttggctgcagacagcctgagaaagagataagcagagggatggagaatcctagggcctgggagatgaggttagatatctgctcctttctgacaacattgccctaaaagtcagcacttttcaacaacatataatatctcataatgtgtgtggaccagaatctggacacagctcagctggctacctctgccttcaggtcttttatgagactgggggctgtggtcttaactgaagctggactgggaaagcatgagcctttaagctgactcatgtgaaaattgacagggtttagtgtggctggagagcctgactttccttctctctactcgtctgagcaccctctcaccctttgttatgtgggtctctacatggagcatctcatagcattggagcttgcttcctgtgtttgaggaatacaatagacagaattagacaaaaaggtttacacaaaaagagacagaaagatcgagggcgcaaacgagaaaaacccagtaggagaaaaattagagctttaaaaacatcttgacagggtgcggtggctcacacctgtaatcccagcactttgggatgctgagacgtgtggatcgcctgaggtcaagggtttgaaaccaacctggacaacatggtgaaaccaccgtctcttctaaaaatacaaaatgagctagatgtggtggcgcatgcctgtaatcccagctacttgggagactgaggcaggagaatcaattgaacctgggaggcaaaggttccaataagccgagatcacaccactgcactccagcctgggatacaagagtgaaactgtgtctcaaaaaaaaaaaaaaaaaaaaaaaaaaagaaagaaagaaagaaagaaaaaaaacttgagagttactataatttttcttctatatttgtgttaaaattgtaaccccgggcgtaatgctataaggaggtagaatgtaattaaacccttagggtgggaccctcataatacagattactggctttatacaagaaaccgcagagggctctcatcctcctgcaaaatgagggtaaaacctgaagtgtgcaggctgaaattcagaagccagtcatcaccagatctcaaccatgctgacaccctgatctcaaatttgaacctctggaggtatgagaaattaagtcctgttgtctatatgctgcctatctatggttctttggcatagcagcctgaactaatacaaaagtgatatccttttctgtgtttcattggagagaagctgaatttgtaccccctatactgttaaaaaaaaagacttaaaaaatggatcttcagaatgaaagataggaaacggcttgttgaaacactaaaaatttaactgctataagttttttaaacattggctgaaattgttggaaccaatattgccaactgaagtccatgaagcatcactttgcagactttggagcccaaatttccattgtgtgcttcatactaactctccctgaatttgtatgtgacctgtgaggaaacaagaagagatgactgtatatgtctcatgactttccatattcctactttccttccagcaatcccctacagaacccacctattaggccttttctaatcactgccttaaagccagtatgacaaaacaaatttgatttgaactcctatctccttgttagccaacatacaagatgatattttcctcaaaaccgaagggccatagtactggcatcaggaagtattccattttattcaataaaaaactgagtcactcaatacctagtactgggagactttgtgaagacttcctctgtcatagacgtgataaggcacatggatatgattctaaatataaagagaaagcactagaaagttgaattcctgtattagatcattctcatactgcaatgatggagtacctgagactgggtaacttataaagtaaagaagtttaattgactcacatttccacataattgtgggggcacctcagaaaccttccaattacagtggctgacaagtgaagtgagtgagagcatgggatgtaccagatgcttatgaaactatcagatctcgtgagaactcactatcacaagaacagcatgaggagaacccgtccccataatccaatcatctcccctcaggttttcccttaacacctaggggttataatacacaatgagttttgggtggggacgcacagctaaactatatgaatgccagaggacagtatctacatttaatttcaacttcatactggagcagaatgaaaatgaggcccagtggagaagtgatatttccaagatcaccctggcagacaccaggcctgtttgagttgtggcccatgctacctcccacctattctcctaatgcttccatctctaagtgtatgcattatctacaggtgacactacatcattatttttatgtcttatcttatatacacctaatacattccctaggaagtagatgttagcatcatcaccagtgtgcatgttaggaggctggggaagccttgaatacagtgacttttactgggtcccagagatggtaagaaaaacaaggttatgttccagctgtctcttctatcctggaacccaggttgcatttaggtctttccagggaattaaggggaagttgtgtttgcataattgtgtacaaataaagagttgacatggaagaggagactgagcaatcagtagcatagtggggcctttcggtatgtcttacagaaacatggggcccagtagatggaaccttgaagagtttaacatactttcttggtgtcagaacccaacagcagttaagaaaccaggaatccacattcttgagacagctctgtatccacctctgtttgtgagagttgctcaagagagtgagatgctctttcattgtgccctgaaatttctgagtttcagccttacaaaggctcaatgtaaaagtcttatctgataacacagatgtcaactgagccctcatcactgatgtccctggcttttggccgggtgcacctacaaataacacagggcagcccaggacaggcccctccacgccagcctctcttgtcaactcatctgggcagtcccacaccacttcttagtaccatgagttggatggggagcaagagggagggcactcttcttggactgaagtagattgtcgggtgttggaactcttgtgtacctgtcatgttcatacctaggccatagctggcagaataaaaagaagagggttggagaacgagtctgtgtactcagatgtgaattccaagactttaacttgtcctctggtttccttccttcatggagatttatacagattctccttatgtgcctaatctgaagagaagaatttcttttattttcttttttcttttttcctttcttcttttcttttttcctttcttcttttctcttttcttttctttctctttctttctttcttctttcttttttttttctttctctttctttctttccatctctctctttctttctttccttctctctctctttcttttttatttatcatgaagtctcactctgttacccaggctggagtgcagagaaaagcagaatttctaatggaggtgtcacatacggtcaaagcaaggaagaacacagacttttctttgcgtggtttctaggcacatttacaaagctgcattcagattgatgaggagcttcatcattcagtttaatgtggccaactcctccctctttttggaaaaagagcaggtgcactaaaccagcaaacacagccagcactgggctgtgctgagagcagccacataggggtctctacagacagaaagctgagaagacagggaaagaaacaggacccagactcaaatatgaaaaatctctgggctttgtcctacggccttcccatgagtaactcatagccttgttccagtggaatctggccttcactagtctcagtggcaagttggttatgtggaaagtctctcttcacacacttgtgcgaataacggtaaagaattttgtatagttttcactttacattaggccatgagtatttatgcctgtggctgcagtttgtgttagtttccggccccacgtatctcctgcagcatgcagcttcagtcctatcggaccctcaaaacttaaaagctaacactattactagggaggatttcgcaggaaaatggagaaagggttacacacaaaaaaggttaaactactctatgcatgtttctgcaatgtgttatctcaggaactcatttctgtagcccatcagggcaggagctgggctctcacctgttgataatattccataagggaggttcttccccacagtgtttagtctcccgacgctggtacagcctgacatgatgacattctactttcatgtcggtcatgctgcagggaaaattctgagtgttctaataggctggaatcatttgctagggtgaaccccatctttggttctcacttttctgttatcttgtaattagctttattctcagcaaatccatgtctattttatttatctgtttatttacttatttttatgtatggaaaaacacttttttttatttacttatttatttagagacaggtctccgtctgttacccaagctggagtactgtggtagagtgctgtgatcatggctcattgcagcttcaaactcttgggctcaaatgattctctcacctcagcctcctgtgccaccatgccctgctagttgattttaattttttataaagaaggagactcattaggctgcccaggctggtctcaaactcctgggcccaagcaattctctcatctcagcctcccaaagcactgggattaaaaacatgagccactgtactgagctgtgcctacttcaaaagactgaaaataaaaaatcaataaatctttgccaaattaaaaaacaaaacaatagtttccaggtcttagacaaagacaattctgtgtcatgaagagtggcaaaaggcttatttagctgttaaaatgatttgcttatatttcaaagaagcagagaaaaaaagatacatataaaagttttccaggccaggcacggctgttcatgcctgtaatcccaacatttggggaggccaaggcaggaggatctcttgaagccaaatgtttgagtccagtacaggcaacatggtgaaattctgtcaccataaaaaaataaataaaataaatatggctggacatggtggttcacgcttgtaataccagcactttgggagtcggaggcaggtggataatgaggtcaggggttcgagaccagcctggccaaaatggtgaaaccctttctctcctaaaaataataacaataaaaaattagccaggcatggtgctgtgcgcctgtaatgccagctactcaaaaggttgaagcaagagaattgcttgaacttgggaggcggaggttgcattgagctaagatcatgccactacactctagcctggcccacagagcaagacactgtcttgaaaaaataaataaataaataaataaataaataaataaataaataaaaagttagctaggcctggaggtgcatgcctatagtcctaggtaattaagaggttgaggcaggaggactgctcaaacccaagaagttaaggttatagtgagctatgattatgccattgcacttcagactaagcaaaagagtaagattccatttcaaaaaattactaaaaaaagttctctaaattacattgtttaagaaaagggaaaagaaaaaatatcttttttaattttcaaatgggagaatagagcctctcatttctaatatgtatttccttctgcaaaaacatggtctaggcccatggtcttgaactactggacatctgaattttagtaggtgctggattcaggcaactgaggggtggcttggacacactaagtgcacgtaaataaaaggtttgaggtgaactaaaaggtaaaagaggggaaggtgctattaagaacccacagttgggagacagtacagggttggtggaaggactggttcatgctacagatactgacccaggtgaaactttactctgacttatttctgtgtccatgcaggaagacgagattatgatcaggtggcacagaaacctgggatggtgaaaaaaccaggttgcccctgcagattcggtgtctgaggtagaacgtatgccaggggtcttgtaggcacatgtgtgggtttttggtgggaaagtctatgaggaaaggtagcatgggcaacaatcttgatgccaaagccttgtcctgagaggggcttggccacatcaacatgcagtgtgtatgttcagtgggtgaaaaacctgtggtggcctcaggttggcaggagggtagaaggcatctgttctcagaacttcttccctcagagtcgtcggtccttcttaccatgggagaatgcctggaaccacagggcagtgcatggtgtagcagcctgtgtgcagagcagagcctaccttccccgagacacctggagtctctctccagcagaggcccccacattgtctttctccttacaacacttttgatcctaaatgtgtaaagttccctgaaaacccactgcttctccaacacccatttgttgccccaaaatttaattctgacacaacttagagttcacacagatcccagaaattcagggctcagtcccacatcacccctctcactgtagaggagagttacacatccctgaagcccatctacacttctgagctacctcctataaatctgagactagcataaaccccttttcaagttaaataatttgatagaattactaaaaagaaaacctcaacaaataactgtaattatatttactactttattataaaaatataactcagaaacagccaaatggaagagatgtctagggcaaggaacagttgtgggtgaaggcaatcctggaaatagctatatttaaagaaattcccccattctttgcattctcaaagaacagcttagtgaagagaaacgtgcttcccctgatgactttgaggatgctccctgctgtttttttaacctatcacaaaaatggacacagattgcaaattcccatttttaaaaatgaacaaccattcagtaatttagtcttcagtggtccaaataacatactcttaaagaaactttgcttgtttctcttcttccaaccagcccctgaactttgactcacccacagcttcagcaaacctacaacccttatttatacatacccctcctaagaacaggctgagttcaaggtgaaacattatcttatctgggatcgcattttgctaccctccatcgtgtgcttcctttccaaccttctttgtaaacttgttttctcctccctatgaaataaggcccttttccacctaaccttagagatactcaaagatctaatcatttgtactttttctttgttgcaatacttcttaggtaacttcttagaccaagtctagaaacagtctgaggacaataacaattccattctaaaaagaatctcccaacatttcttctatctcaacctcaactgcatctgcctgtgaacttccagcttaccaaggctctatatcttctggcagtgacaaaggctccttccatggttggtgtgagtaggcttggacacctgcagggcagacacccaggaataatcaactgggccttcagtggtcctcttttgcagggtcaaggtgggccttagcttttagtcaatggtctaagacttctatttaccagttagtcattcagttagttttcaattcaaaaaatacttcatgtttgaagaatccagcaaaaattattcaaatctaagatataaaagagaggaaattacagccgggcatggtgactcatgcctgtaatccctacattttgggaggcctaggcgggcagatgacctgagatcaggagtttgagaccagcctgaccaacatgaagaaaccccgtctctgctaaaaatacaaaattatccaggtgtggtgttgtatgcctgtaatcccagctactcgggaggccgaggcaggagaatcgcttgaacccaggagttggaggttacagtgagcagatgtcttgccattgcactccagcctgggcaagaagagtgaaactacatctaaaaaataacagaataaaataaaataaaaacattataaggggcttatatcttataattcatcaagaaaagccaaagtatctatccctttcagaaaataaacatgtaatttaattatgttcaaaacaaatcatttagtaaacaattaatcatatgtgaacacttccaggaggtgcaaagtcccagctcctaaaacttaacattaccctcaaacacccagatggcagcatatggaatagagttattcactttcacaagttctctcttttgaaaaaaagaataacttatgtgataaatttatgtaatttgacaattaatctacctcatgtgcttgcagatatgtattcatttcctaccaccgtagtggaagagagattttccctatctttacaactgatagcatttccaacagtaagctgtgagattctgcttgaaatcacctctcaaacaaataaaaaacagacctgggagacatgctacactcattctgctgaggaaataggtaagtaacaatttttaacaaatgaaatacattactacttaattttattcaaaattcaccaacttaatgtgctttataaatattctcatacctttgaagctctactgataaaacataatttacagttaatgaaaaagtgaagttaaaataaatacaatcatattttcaaggtgacaaaattagaaggtgacaatggtgattgaaacacagacatatctgacccaagggtcaagtcaagccgttctattacttgggatattttccctgcttctatctggttcagtgatgtgggtcatgagcgtcctaccaggagctgctacgctctgctccactgtgtctgtgaggtgcattttactttgcaggtttttgcactgcctcactaggttgggtttctttgtcctttgaaatattttctctcccttcaccaatctgaggacattttttcctcactattcagcatccagttgcctggcatgcaatgtgtctctaaggaatggaaactaagcgttggggtaagaaattcttaatgtcctaaagggtttgcttttagcgcaaatgtatacgtggagattccttccaggtatagtgcatccaaccactccaaaaagaggctgcattcccataccttgggctgttccctgagaggagatgacacaagggatgttatttactagacacttcaagagtcatggccagtgttggtatcttggggattctcaaacagttttgaaacccaaaaccaagaaaataacacaagatggctgaggatgtattgccctgtgaggtttctgaaatgaaacctcaacccaaaaacattctgatggggtgtctgtgccaagggaagattaaagaaaggggcacaaatattttcttttcttttcttttctttttttttactgtggattgtcaggggattattatctgctttcatgtcctgtaaaatgtttacaaatgaaaaatatttttttaagtgtcatccactgctttttgaaaaaatgcagaattaaaatactgtgtctaaaatgtacaataaagaacagttgataatgttgtgagttacacaaggttagttagtgttggtaagtgtcaggaaagaactggaaatttaaactctgacagcaagccagagttaggctggggtaacagggtggtagatttgaggctcttcttgccacacatttggaaaatgcatgagaaaactaattctcttttggagcattaaaacaactaaaaaacaggcaattgcgttgaggtggctctagtgtcctgagctctgagtagagagacaggcaaaggcatccctagatccaaaaagctgcccattcttctccagctgtgcacctgattagataatttccactccagcacccatgattggatatagttcaattccccaccaagccccctcaggccatgagtgacatatgtgatttgacactggattgaataaagcaagaattataagtttttcctggatccttttctggcagggcttccttcatgcactggacactggccctgcctgtaaaatacttgcattttcatttgtgtgtaagattatttgtatttatgaaaaatatatatgtgttattcatacatggaagcaatataatgacaattgttttaaaatttcagatgttttactttcctggcacatccaggttttagagcaggcagcctgagatttcaaaaatgaggcaattctctaagaaataatatgtgaggcacatgtgaattttaaatattctagtagctacattttaataaatacaccaggcatggttgcctgttcgtgtaggttgaactgtttgggagactgatgtgggaggatcatttgaggcaaggagtttgagactagcccaggcagcatagagaaagccatctcaacaacaacaacaacaaaattgaaaaattagccatgcctggtgtatgccttcagtcccagctactcagaaggctggagctggaggatcacctgagcctgggaggtcaaggctgcagtgagccatgatcacaccactgcactccagcctcactgacagaacaaaactctgactcaaaaaactgatctctggaaaggcattttctttttctgcaacgtagccaaatagctaaatttgtattgaagccatcctttaatttttaacagggcaagaatattttctaagaccccgaactccagatatgcgatggggcaaatcctgaagcgtacatggctatctctcacagctaaagcacccctcacccctatccagcgcttcttacccctggcgcaagagagtcacctgcggggaggaaaactatcaaaatcccttaaacccaagttgtaaccgcacaactaaatcagaatccttggagctggatctgaaaaaaatacggttgaaagttgtgcaggtgattacaatgtgtaggcaagccagaaaaccatggctttaacgagcagcttttgttagaaatgatttctcaaatgaatgtaaaaacgtttgctgctgaattgtgacctttcaattttacctgcttttcctgcaaagtatattttgcagacccaggctggcttgtccttctgttcatggttcacccagtgccgtgtgtgctcagtgcatcctgtgcacgggtcactgtgctgtgtgcgctggccggggtgagcatcattcttcggggagaacctttctgaaaacaaagctgcaatccaaaaagttaaaaccatgctacttactgtactgaggtaaaaattaaaagacctaggggactcttccaaaagttaaaacgtaaataaatatcttggaacattaatatacacctgacgatgtcctgagtgaacacgccccactttaaaacaaaacaaaacattactattattctaaaatattaatttaggattgttatgcaaatatgtactatttaaatatttattgatgaataacatgcatacagcaatataggaacaaaatatttatggaatgcttgatgaattattactaaataaatacacttgtgtatgtaagaatcagatttgctcatgcccttgacactttctccttcccaaaggtaaccaagaccttaagagctaagtgtagataaactttgtcattttctacacgtgttttattacagaacattaaaaacgtatacataatacaaaaaaaggataacagaccagtcacccagatttaacagctactagtcatgtgtcatttttgtttcacctatacttccagccatttccaccccaatttcattattttttagcctttttggataaaatgtatattcattgcaaggtacaatgtgaactgtgaatagtagagagatggggtttcaccatgttgaccatgctagtcttgaactcctgtcctcaggtgatccacctgcttcggcttcccaaattgctgggattacaggcataagccaatatactcagcctgagaattttttcatacttctaagaaagtacaaatccatagggcacatgagaactgcaatgtctatctacagtaaatacagtttgataaataaaatgaaaggcaattgacctaaggtgaaaagaaaaacaaaaaacaatcaaagcatgggtactatgtgtcatctgtaagagcatttggttaagaataacaaacaaaccagttttatcgttttaatagccgaaattggcaaaatttctagtttttctttcataggaatgctctttgcaagaaaaaattttcatatagtgagagcaaaaatggcaaccatttgcaagtaaatgtcttatgaaattaagtagcagatatcaagctcatgaccttcagatagttacccctaactcaatcacttacatagcaagtgcagataattttcatagctccctattaaaattatatttgaatgcccttacaaattgtgactgtttttaaataaagttgaccaactaaaattttgtatatgacatatgataaattccccttcaagtcaccttacatttacttaattttattaggcagtgtctgtctaccacccaataatacttgacgattctccctccatttgcacaggcatcatagctgggaaacggattcacaagacccaggctgttccctacatatgtttcctcctccgacatcagttcatcagtcaatcaagccatgtgagagtggaggccttgtattccctattattcttgggcactctactccaagtaggaaaaggccaggaggtcctgttaaaggatgcactcagagcccgggctccctaacatatgagagtgctaaccagcaggtgtagacttttcaggagtgaagaatgaggcaggcattccaaacctggaccttcatcaccttttgtttcatctcaagacaattctgagggactgttttggagcgtgtctggaaggtgaaccttgaagaagagtgtgggctttgatgtgactcagttgagatctttcatggggaggcaggaattcaatgcccagaatctgggctggtgtctttgaggtcagtaggttgcgtctttgtatccaagtccattgttactaggttggaggctggagattctaaatggcttccagaccatctctctgattctctttgggagatggggtctgaaagacaatgtcagtagttttgggaaattctagaaagtgtgcttggaaacgtgggaagagctcttgcctagtgcctaaatgctccatttgcagctctagccaagtagatacttggtaggtatagagccgggtttgcgtttatatcagcaaaacctatgtcagagttgaagaagtagtcaggaaaaagcgtcttggtcgcaggccggggaacatcttaaaagcaaacttctagcctgctgactcttggcaatgagtgttggatcctggctaaagtgccttgaatgcagcatgaggccaatccatgaatccaacttctcatggagaaatgttaatattttttcagtttgaatcaatcagggtgaaactaccatgctattggtttgcttactttttattatttcatgtaaaatctaagacaaaatacattaaatgcttattgacatatgtatttattcttcaccaggctgataatatctgcctaattttaaactttcttccattttgtaggtttcaacttattctattgtaagatactgttaaatctaatagaggcattgtcacttttacgtataattttattttatttcatatatttcctattggctttttacatttaaattatggagcacttcatcatataaaaaacttcaattatatttaaacagtaagtctttggatttttttgccttgtaatttccatattacataataatgagataaacattaatgttttcagggtactttaaattttagataattactcattgtattcatgtgaaatttgtttttactgcatgtgtgggttggaggactgttttcacttctgattcatctttactcttatctcatcagagctcatacctcttgtagttgggggattgcagtttataattccaataaatggggcaaattcaataataacataatacaaatgagtttgaatgcaggacaggtcttcaaagcatacacaacatgggcctacatatgtacaacaataataatttataagttactgtttggatggaaagtaaaagtacagaaaatttgttaaaggaaattaaaatggagatcatgtctcaataatctctgagcagacaaaattagttaggtctcataagtgatctcaacctcgcttgatttgcaaatacaaacaaaacttaaattatttcttgtagctgcatattgaaaaaagagaaatgaagctcaaccagtcagaagtagccaacaaccttatataaatagaaactgtccaacaaggtaaacagacaaacaaaaaacaataaaaaaagttgtgctaccaccaaatgatttctttgtttctacatttttcaaataaatacttgcttcttacactgtcaatgaagcactcaatatctttccgtctgatattttataatttatcaattgctcttactcaaataaacactttgcaatttcattgtgtctcaaattactttttagcagaataaactaggaataaatattacaaaaatatctacggaatatggaaaaaacatagaaagtttatgaaatatatgaatgtagacataagcaaatagacaatttgtatcatattcttaggcagaaaaactcaatattatcaacatcaattgtccttatagttatttataaattcaattttgttcctatactgataccattaaatattgcaagtacacgttactataaaatgttatatagatgaaaacacaaacaagaatagacaagaaaactctgaaaaaaaaaaaaaccactggcaagccctgtgtaaaatcttgattgattaaaaaactcatggatcactgaaactaaaaattcagaaataaaccaaagtgtctaagaaagtgtcatagtgcatcttggctgctataccaaaataccttagactgggtaaaggataaataagagaaatgtatttttcacagttatggagtctggaaagtgcaagatcaaggcagcagcaaatttcgtatatggtgagagccctattccccatagatggtaccatctcgcacatgggacaagggcattcccttcaacttcctttgaaagagcactgattccattcatgaagatgaagaactcttggcttcaccactttcccaaaggcctcacgcctaaaattatacacatgaatttgaaaggggacataaacattcaggccatagcaataaaaactacatgggtgatggcatcatttatacatgaggtgtaaaaatgtgatgttcttatcacaaaggaaataaatgatttattcttcatggcatatatcaaaatgaaggtccaatgaaaatattttttatgaagataaatctatatggcaaaaaattaagtattgataagtttaaccctacaggttgcatcaggattttcaaggtttccagggatgagcaaggccctggagtttcctcctgtgacattttcctgaaagttgctcatgctgttattcaatttgaaagtagataatattgtttgtttctcttccaatatttactaaattcaaaataatatagggctctttactcataattctcaaacaatcattcagtcagtggggctctgctgaggaagagcacagacacatccacacaagtataatgttcctcaaatagaggacttctccttgtgctggagccacctatgttgcactcgatcagaggctttcccaggatagcatttctctgcagccctacctcagtcttaaccctgaaaatcccactcagaaggcgacggatgaacacccaccctagcattctaatctaatggatcctctcttaacaatcccttccagggatctgggatctttcctggattcgtcggccacacacacctaggctcaaaaatttggacagaaactttgatcctcattggccctcctgccctgtcctaccagcttctctagaagtatgcttctctaattgctccttagagacactatctaagggtatcaacctgtgccaatataattgatctcataaagtgagaagggaaataggcaagagtccagctagcctagaagcagtgtctagggttccttacctgatttatgtctctgatttacctaaatattgacaaatacagattcacctctaggcagtagaaaaacagaaggagaaatcccagttcgtagaggaagaagaaaatgcaatcaatgctgtctagagtcccgcttaagctcagccacagggtactaagtctcttcaggaaaaagcaattgttgtccatcatctgaaaaactgtggcctggaaccatgggcaccgagagtgcacactgcccactagagttccatgcctacatcacggagagatagaatagtctcaaaggattcttaagagtaatgtggggaccaaaaggagatgaatccacagcctctgccttaccgtctgatctaactaatagtatttccagacctttctgtgggctgcaccaggggttgttcagaaagaaaaaaagttgttaatgtcccaccgtttcccgtagcttccgaggtctgtgttgttcataccccaggttccaggttgttctcccactacttccacagaatcagtgtgtctcattccggtacctataatctcatctttattctagtcgccctctacttttttctagacactttatctactagagccaggtaaaatagagacaagaatatttacataaaacttagctggaactaagttggagtcccataactgctactaggctgagatgcaactcagaggatacaaaagccaggcttgcctagaattgcagttatgggaaagaaagtcacatttcacccaggaattattagcacgaaattccaagtttgtgaaatagattcctagatgattcctagatcccccaaacatttcatccttatcttggaggcaatcaggaagagaaaataaaccatacctaatcaacaaattatctaaccagcatgtgtggaaaaggagggaacatcatagagttggcttgttttagtacgtgtggtgaaaaatgccgcgaagtcagagctcaattggtctcaaaagcctaaaagatggcacagattagcttcacgggacacatggtatggatggtgtcggcatactgttatgctgaagatgtcaagagtggtgactgatatctcaagaagtgggccaaaagtccacttctggttactctgcttggtatggtctaggaattcttcaaccatgagacaaataggtcaactttcaccagcaaccccaagtctggtttgcagtattagactctgcgttagacacagatttaggttcaatctgcagcttgattgttgtcactctctagaaaacaaacccttaccatggacttctagatgagtgatccagttagatcagcatctgagattgtctccagtttgcagcccaaaagatattcagacagtctacagtttccattgtagataaccaaacagatagaatatgtgccattatcccaaaccctgagttctgacctttgagaggagcaaccactcatgtcaggttctgtatggctggcacaggttaaacagccacagcagcccagtggacatcatgaggtttcaccttccctgactcatctatgaaccaggaccagtcatataggaaacactcagtaaattgggggccccacagagacagcatctttgcttcagaggatagaaggaggcataaaatttcaaccagctggggatgctctagccctctatgggtgaaactgagtttgtcaggagttctgcagcaagctcttagctgactttcaaatcagtgtaaccagtagtgtgtcactgagtccaaaagcccaaagaacacctctgggaggaggctagtcctttactagaggctccaaatgccaaaatcaagattttcttgacctcaggatgaattgatcaatgcaaatctccccaaatattttcactaaaccttaattggaaagtaagactccagattttttaactctcactaaacataaatatctgattttttcacctgagatctatgtatgtgtgttggagcatgcctttaccaatcagcataaagttacatctctccttgagcctctactttctacttgtgcagagtttaaaatgcagaggtgagagcttagggttttctgggtcttttgctaagcatgtacctgaccttgagcatccccaattccccatttccttcttgatcccaaagaccgttatcacagtcttaattcccagcagcttttcctcctagagctttttgacatgattattcttagacccaactgatatccttcgttcctggtagactgcgtagctcatttccatttaaatgcttttagaaatattaaactatggatttaagatttatctgctttttaaattaagtaatgctgctcttagccttccacaggacttgagggttataaaaaaaaaggaagaaaataattattttataccaatagtatgaaaaagagactgggaatgactatattaatagcagacaaaatagacttaaaaacttaaaagagacaataagacattatatagtcatagattgtccatttggcaggaagatagaaatagtttaaacccatacctaataataaaacattgagatatagaaagcataacttgacagaattaaaggggcaaaaaggcagttctaaaataatagttgaagatgttaatactccactctgagtaatgaatagaaaaatgagatagatgataaattaggaaatagagttcttgaataactcaatgaaccaaattgatctaacagatatatacaatatactccatccaacaaaagagactacacactcttctcaaatgcacatggggatttccccacgatgggctgtgtagtagatctcaaattaaatcaataacagaagaaacgttagaaagtttacaaaactgtataaattaaacaacatacccttaaacaacaaataagtaaaggaagaaatcacagaggaagttggaacatacttacagaggaagaaaaatgaaaacaaaacacatcaaaagttaagggaaacagcaaaaagagtgctaagatgtaaagtttgcagctaaaatgcatttaaaaagaacaaagatttcaaataaataataactttatcacctagtaaattagaaaaataacaccaaattagatgcaaagcaaagagaaagaagaaaatattaaagcttttagcagagataaatgcaatggagattatacaaaccacagaattccaaaaaaccaaaagttcattctcacttcttcaaaaaattaacaattggcaaactttcagctacacacacaaaaaattaacagcatattcacatactaaaatgagaaatgaaagtgggacattactactaattcaaagaattaaaatgtttaaaaaactgtactgtgaactatgataggatgataaattggaaaacgtagataaagtgggcagattcctaggtatacaagacttgattacaaagaaatacaaaatctgaatagatacaaaactactaaggaaatggaatcagtaattaaaagcctcttcataaagaaaagcccttattttgttggcttcactagtgatttagatcaagcatttatagaacaaaaatcctttccaaagtctaccaaaagcctgaagagagcagttccaaacttattccatgaagccaccattagctcataccgaagccagacaaagatactacaaaaacccatagactaatatcccttatgaacacggatgcaaaactagtcagcaacatcctagctaactacattcagcagcatactagcaagattacaacccatgaccaaggggagtttattattggaatgaaaggaagttttagcatatgggtggtttcagtgcagtggtgtttacaaataattgatcacaaccagtatagatttctttattctttttccagtctcactggttcacttagctagcctttcttaacaaaagtttaagcatatgaaaattaatcaatgcatatgccacattgacaaactttttaaaaagtattctctcattaatacagataacgtattttacaaaattcaaaatattttataataaaaacaataaattaggaataaaaggaaaccagctttgtaaaattcacatataaaaacccacagcaaacaacatattccagaggaaaagatcaaaagtgtttcctctaagctccgaagacagagtgaatatctgctcttgctagccacttttattcaacactgtattagaagtttcattcagagaaattaaaaaagacaatgaaataaactgcatcaaaatgtgtacagaaaatatattcttatatgtagaaaatctttaagattccaccaaaaaatattacaactaataaattcagctgaatagtagcatacaaaatcaacatacaaaaacaaactgcattttatgtagtaacatgaataatctgagaagaaaactctgaaaacaattcaatttacaatagtatcaaaagaataaagtagttaggaagtaacgaagaagtaaaatgccaattactcttgtgtagatattaaaaaatcaatttttaagtttatggggaatctcaaagatctttaaattgcaaaaataattttgaaaaaaataccaaagttagacaagtcacacttaatgatttcaagacttactacaaaattccaaaatagcatgctacaaagagactaatggagtaatatagaaggcccatataaataaaccctcatatataaggtcaaatgatttttatgggaaatgaactgcctttacaacaattagtgctggggaaattgggtgcccacatgtaaaagagtgaagctgggcccttaacttctactataagaaaaaattaactaactggatcaaagacctaaatgtaagagctaaaactacaaaattcttagtataaaatgtaggtaaaacacgtcataaggctggatttcgcagtgatttcttttaacaggacaccaaaaatgcaagaaacaaaagaaaaatagataaagaggactctatccagaatatacaaagaacaattcagcaataataaactacttgtttaaaatatgggcaaaatacttaaacagatatttctctaaaaattatgtgaagtggcttataagcccatgaaaaggtactcaacaaaaccttttcattttcattagtaaaatgaaaatctaaccccaaatgacatatcacttaatgcacatcagcataactagtacaaaaagaaaaaaaaaacagaaaatcacaagtgttggtgaggaagtggagcagttagaacccttgtacacttggtggaaatgtaaaatgctgcagctgctataaaacaacaccatagtaacgaaataatttacactcaaaatcaccgtatgatccagcaatttcacatcttggtatgttgcaaaagatgtgaaagcgaagacacaaaataatacacgtacacctaagctcatagcagcatgactcacatcactcaaaaggtttttgaattacctgtgttgtttgaattatcatcaatgaataaatagataaaatgtgatttatacatacagtgggatattattcagttatgaaaaataaggaaattctgacacatggtacgtcatgcatgaaccttaaggacattgtgcaaagtgacatgagccagtcataaaaggacaaatactgtatcattccacttatgagatacttagagtagttaaattctggaaacccacgtagaagagtggttcctaggagctggagggggagtaacagggagctgttatttaatgtgtattgaattttggtttggaagttgaaaaaagatccttatgaatgggaataatagttgcaaaacaatgtgagtgtagttaatttctctgagctgaacacttaaaatagttaagatggttaattttatgtatactttgccaaaatgtaaaaaatattttttaaataaacaaactatagctatctgcaatagcatgaattaatatcataaatataaagttgcctagaagaaagtagatgtaaaagtatacatattatataatttcacttatataaaatccagaaagtgaacacaactgaggttctggtttccagtaataatgaagtagactagttcgttgaataactatttcacagataacaataataaagcttaataaaatactatattttgctatatagaaaggcacactgtttagaagactgaatgaagattttatctatgccactgtggaagagataaggattggggtttgaatctattcaaattaactccctcttaaaataataattttcaaagaaatacaacagaatccagagtccctgtagttcctatcacacaatttaaaaattcatgagatgtgtgaagaagcatgaaagtgtaatcgattcacaagataaaaagcagacaatagaacctattctcaagatgtgcaagatgctgtaatcagtagataagatttgaaagaagctatggtaagtacgttcatgggggtaaaagaaaacagtctcatgacaagtgaacagaagcgtaactgtacatttcatgcgcgtccgtgtgaagagaccaccaaacaggctgtgtgtgagcaacatggctgtttatttcacctgggtgcacgcgggctgcgtccgaaaagagagtcagcgaagggagataagggtggagccgttttataggatttgggtaggtaaaggaaaattacagtcaaagggggtttgttctctggcgggcaggagtgggggtcgcaagatgctcagtgggggtgctttttgagccaggatgagccaggaaaaggactctcacaagataatgtcatcagttaaggcaaggaccggccatttacacttcttttatggtggaatgtcatcagttaaggtggggcagggcatattcacttattttgtgattcttcagttacttcaggccatctgggcgtatacgtgcaagtcacgggggatgcgatggcttggcttggtctcagaggcctgacatacactcccagtcttttggtcacagggctgtgggactgaggagggaaattaaagaaaaataaaattaaaaagaaagagaaataaattttcttgtattgggctgacttgtcccagaggcttcaacaggcacagcccagaaccaggaatagtcttgataatattatctaatgtgctctggaggctctcccaacgctcccccaacatcgggaaaagaaaaacaaatttcctttttttacggaatgagtttatagattcttgttctctgtaactagtgacttcaagtattctgttttatctaagaagtacaatgtaagtcatgagaagcctgagtaggctgaactacagctgtttgggcaccatagtgagggttataggataagcccatgcccagggaaacctagaaaatggacatgtgggttgcttggcaacggtcatgtgcaatcctgtctgtcctgcctctgtatccctgctttcacgccactgtaaacttgcttcaagctagcccaccaccttttgtgaaatgtgcataaaagtcaggttctgtctttgttccgggcccagtctttttgatgtgagttagcttgtcctcagtttcatgggggtccgtgtgaagagaccaccaaacaggcttcgtgtaagcaataaaagcttttaatcacctgggtgcaggcaggctgagtccgaaaagagagtcagcaaacgtagatagggatggggccattttataggatttgggtaggtaaaggaaaaagggggattgttctctggcgggcaggagtgggggggtcacaaggtactcagtcggggagcttttgagccaggatgagccaggagaaggaatttcacaagacaatgtcatcagttaaggcaggaacaggccattttcacttcttttgtggtggaatgtcatcagttaaaacaagaaccggccatctggatgtgtacgtgcaggtcacagaaggtacgatggcttagcttaggctcagaggcctgacactgagtgcactcaataaaaattctcctgtttcaacccggggtctctctcatcctcctgaatcccgcaacgggagaattccagcatgcaccaggttcacgggacagtgcgcggtcactgaaagaagagtggggcggggagggtggtgtgcggctgtgagcacctcttgtgcttgctgggagatgtagtcttataaagactcccagccctttggtcacagggctgcagcaccccaattccagcatacaccggaatcagagacagtgcgcgccggcagaggaagaggtagagctgtgcgtgactcgctgggcttgatggaaaatgtaatctcatgaacactccttaatgaacagtgcgcctcactggaggaaaaggcggggctgtgcaggccttgctttgcttgctgagagatgctgtctcataaacactcccagccctttggtcacagggctgcaggactacattcccatcatgcaccgggatcagggatagtgcatgtgcctgggtgaagagacacagttttgcgcgcctcctttggcttcctgggagatgtagtttcataaagacacccagacttttcattacagggcagcaggactacaatcccagtatgcaccaagatcaaggatagtgcgcgtaactgcagaatgaggcgggattgtgcacgcctcgctggacttggtgggatatgtattctcataaacatacccaaccctttggtcatagggcgggaagactacaatcccagcatgcacctggctaagagacagtgcctgtcactggaggaagaggcggaagactacaatcccagccagcaccgggctcagggaaattgtgcgtcagtggaggaagaggcggggttgtgtgctactcgccaggcttgctgggagttgtattctcataaaacctcccagccctttcatcacaggcctgaaggactacacttccagccccagcatgcactgggctcagggacagcgcgcgtcactggaggaagagggagggctttgcgcttctagctgtgattttttgggagatgtagtctcattaacgctcccagccctttggtcacagagatccaggactgcaatcccaacatgcacccagctcagggatagtgcgctaatcactgcaggaagaggcagggctgtgtgcacctcctgggcgtactgggagatgtattctcataaacactcccatccctttggtcataaggctgcaggactacaatcctagcatgcacccagctcagtgacagtgcgctagtctaaggagaaagaggcagggcagtgtgcgccttgctgggcttcctgggagatgtagtcccatggcctctccctgccctatggtcacagtgctataagactacaatcccagcatgcacggggctcagggagagtccacatcactgcagaaagaggggcaggttgtgcgcacctcgctgcgtttgctgggagatgttgtttcataaagactctcagaccttttgtcacagggctacaggactacaatcccaggatgcatcgggatcaaagcagtatgcgacacggggaaaagatgcggagctgtgtgcgtctccctaggtcttctgggagatgtggtctcttggccctttggtcacagggctgcaggactacaatgccagcatgcagcgggttcatggacagtgtgtatcactggaggaagacgtggagctgtgcgtgcctcgctgggcttgcagggagatgcagtctcataactaccccagtcgtttggtcgcagggctgcagcagtacaatttcagcatatctctggctcagggagagtgcactagtcactggaggaagaggtaggtctgtgcgcacctctctgggcttgctgggagaggtagtctcataaacactaccagccctttcatcacatcgctgtaggactacaattccagcatgcacggggcgccggggcagtccgcctcactggaggaagagaaaggcgtgtgagcgccttgctgggctttctgggagatgttgtctctttatttctcccagccctttggtcacagggcttcaggactacaatcccagcatgcatcctgctcagggacaacgcgcgtcactgtaggaagaggtggacctgtgctgttctcgctatgctttttgggatacgtattctcgtaaacactcccagccctttggtcactgggctgcatcactacaatcccagcatacatcgggatcagggagagtgcgctaatcagtggagaaaggggcgaggctctgcacacctcgctggtcttgctgggagatgcagtctcataaacactcccagccctttggtcactgggctgcagcgctacaatcctagcatggaccgggcgcagggaatgtgcgcgtcactggaggaagaggcagggttgtgcacgcctctctgggcttggtgggagttgcagtctcataaacactcccagacctctcatcaccgggctgcaggactacaatcccagcatgcacccggctcagggagagtgcgcattactggaggaaaagtctaggatgtggatgcctccttctgcttgctgggagatgtagtttcataaagactaccagaacttgtgtcacagggctgcaggactaccatcccattatgcactggggtcagggacacggcccgtcagtggagaaagaggcggggctgtgtgcgtctccctcggcttgctgggagatgtattcttataaacactcccagccctttggtcaaagggctacaggactacaatcccagcatgtgccagtctcgggggcgaggtacaggcctggaagaaggggccgagtggtacacgccctacctaatatgctgggagctgtagtctgttaactgctctcagcctgtttgtcggtaggcttcagaactataatcacagcatgtaccgggacccggggtgcatagccctggagggaggggcagagcggtgtggacttcccggtgtccaaagcactgctgagttcttatgctatgccgactctttgccaaggagaatgagtacataggtggacctagaggacaggtctgcgctgagcattgaggagggtattaccctacataggcaccttacctttgcccaaatcgggcgggttgtcctcaactgattggccctatccttctcaagttcctctttcagctgcacccagggttcttcccagagcattgcgccttctgcagcccagggcgctgccttctttcctaaactgctgtggaaactgtcctgatgtctgagacactgtccattgtgccgcagccctcttttttctctagccaagcctcatgctcaacagcttttgagagaaatcttccacgtggcctgcttatgaacagcttcagaattctgtagggggtgacaaggtctgtggcttcctggaaatgtcactgtcaatggcgcctttttcacgaatgtgaaagttgaggcatcaggaaggttaattattgggttgcacaaaatctgctaagagcaaaggagaaaaccccatttccgaggcatgagtcttgtgagccattttcatcaacccatttaagtggacaagctccaaaatgaaacctgaagctgctgactatttaggcattttacacttgaaatcatcggtctcatctcaagtcactcctgacttgccagtgtctcagaaacacaaatgggaccggatccctcaggagcagatagtgttccagctttgttggagcgacatttaagatgtggagcacttggggtcgtttgaaacccgctatcttcagtagggacttttacttctagagaacatgtgcattttgattttatctgtcctcaaactgaacttttgctcattttaatagtaaaaacacattcctaggtggagacttaagatgctaatgagacatgcaatgtatgcacaaatatgtacagttagtgcacatgtgcacccagaagaccactcaaaacatgcttacactaacacttctttccaccttcttatgaataatcgtgcaaaacccccagaaggagggtttctccagtaacaattaatggtgtctcactcttatgagcagcctgccctggaatctctttctcagaatgtaccgtctattctgcacttaattttcaaagtagtcttttctttttttgtgtgcaataaattactctatgctgtacttcttttgctgtgtgtttcttgtttgaattcttttaaactaagaaaataagaatcaaggtattacatcagccatcaacatttcttttgccatggcctggagagaggtctgtccgcttcactgatttcactttccctttacttgccgtgaatactgtggcacttccagactacctggttaactatcgctggttcttccagcactgtttcactaaagttctggggaaaccctgtccctttaggctttatgcatttcccagctccttgaaattgttcttcaacaggctttctttgctgaacaaaagatgcacagtcatggataggcccagtcatagggattgaatctgagcattgcaggtgttataattgggcatcataaatggcaaaccactgaattagggaaaggcttgtcagccagacatctgccccccagcgagcagtgggggtcatctcggcagggctggagatgtccagcgctggtgagagctaggacggtgcatggcaaatgcctatgacctcctagagcttcagttaatggggtttcaaggggatgagttggacaacttggtggttccacttggctcatggggctgcccacagcctcctggactttagtacatgttctgtcgtttgcaggattctctcggcaccatgggaatcacttcctctactgtcactgaaacacacctgggatgtatatttaaaaattgaaacagcttttggctaaatgaagcaaaaaaacaattatcttcttttgtaaaactatttagcctgcatacagattagctgacaaaacatggctggagaatgagactgtgaaatttaacaccatcatacagctagatcttttctgtagtaatcagggaaaatggtctgaagtatcctatgtgcaagactttctggcccgacaacaaaacccagctccatgcagcacctgtgggctaaagcctagtaagccacaaagcccctcagatccagtagaagatcatttgttttatggacaagtgaccccagaccccacagcctaataccagctccagataggggccctcagaggcctacacctgctttagaatccccagcgtccccacactatcagagtcttctgtagaatctaagcttgtttcacctcctccttatgctcctctatcagcctttgccagttacaatagagaccagtccagctgcagttactcacagtggagcttcacaccatgcagggccagagaatttgatccgcttacagaaagtctcaaatggagagaggaccatcagagtgcttcttctcttcccagtaaatgatctaatccaatgtaagcaacagctctgatggctctcagacaacttcagcgcgtttactgaagccttccagtctctaactttgaccaccattcaactttaccatccataaatggacccaatgactgctgccaactcagctgcacaaaactttttcttatttgcgaaaaatagaaaagacttaaaacttttgctgctttcaccattttaaagcagaatacttttgcagcacaaatgtcaccataaggtggagccttgggaatccagtataaactatctcagaaaatctcagtgtgtccccaacaggcagcagagggcctcaatagacttcaacaacatctggactccatggccactgcattccaacaaaatcaaagagcctgggatcttctcccagccaagcaaagaggaacatgtttatatctaaaagaagaatgctgttttttgagatcaatcattctggtttattccaagaaaatattaataatatcatcacccaggcagacaaaattgaatctctaggaacttccatgggaacatgaaagcaatgtccattgcctgccttgctctctttaatagtacccgtcattattatattttcaacttctacttttgttccaattttgtttaaaatgttaactgatttcctgctatgttgcttgtggcagctccatgtttgcatgatggtttgcaaggctttcaatctttggctgccaacatcttcccactggttccacgaatgacatggtttacaccctgttagatcacacaggaagaaactttaaggcccaggctaggcagaagtaacacccactcagcaggaaacagctccagaaaaagtggtctaacccctcaacctccaatatggttattgccctaaaatctcttagggggaaattgaggcagaatagatagtacagaaaatgaccatgatctcaggatacagaaaccatggtgactgtacagccaacacaataagccgtagcattcgcattgtaattgggcttattcgagcaaagctatcctcattaaggactttctgttctagagagcatgtgtattttgatttcacctgccctcaaacttaaattttgcttattttaatagcaaacaatgcaccccctagccaggcacggtggcttatacctctactctcagcactttgggaggctgaggaagatggatcacttcaaactagaagctcgagactaaactggccaacatagagaaaccccgtctaaattaaaaatacaaaaattagcagggtatgatggtgcatgcctgtaatcccagatactcaggaggcagaggcacgagcatggcttgaactcaggaggcagaggttgcagtgagcagagatcacaccactgcaccccagcttgggcaacacggcgagactctgtctcaaacaaacaaacaaacaaacacacagaaatacactcctgggtggaaatataagatgctaacgagacatgcaacatatgaacaagcatgtacagctactgcgcatatgcacccagaataccacagagaacatgtttactagcaactcctcttccctcctccttattaataataatgtaaaactgccataaaggggtttctccagcgacagtccacgctgtctcactcttatgagcagtcagccctggagtatctctctcagggtgtactgtattctgcacttaactttcaaatattttcttttccaataaattatgctgtactttttttctttgtgtctcttgtttaaattcttaaaatctaggaagacaagaacagaggtatcacatcagttgtcaacacagcaataagtcagcctccttcttgtaagcatagcccatgcagaaaaggagagtcgcatcacctcggtgctggatccagaggtatgtcacaatttatcccatgcacaaagttaaggtcattgaggagagtcgtattaaataatttctgggcccagggatttgtcacaacagctcctgtgagaagagatcaggcagcataatcacataaccggtgtgctggacacagcgataagccacctttcatctgtgggcatgacccaggcaagaaagaagagtcacggcatttaggtgcttgctgcagaggtacgtaacaatctctcttatgggcaaagctcaggtaagagagaagagtcaaatatccaaggtgattcatgtagaaatttgtcacaagagactttttaggcagggcccatgttggatcttcttatcttccagaagttaggtacagggatatgtcagaatacccaaaatacacagggctcagtcaataaagaagagccacatcacccaggtgctgggtctagacatatgtcacatctcttttatggggaaagctcaggtaaaaaaggaaggtcatatcaaatagttgatagacccagagatatgtcacattgcctcctgcttgaagtgtctaggccaaagactcacatcacattggtgctaggcctgtgttcatatataaacattcaaccagagttaaaatggtggcccacatctaaactcagctcataggcaagggatgagtctcctatcctgacatagttaattgtaatgatgttgactctcatccctgggcctaatgctacaagtatgatcatgggtccctaccattaggaaggtctcaaagttgattacgactctcatgcatactgtatagggccattgggtagtacacagagcgtgctaactgggccgagcacacaggtgagattgtcacactcatatgcacacccagccaacagtaactattgtcatcctctcacgggaacacaggtcagtctgcagaggaattgaggctgtcatgcgcaaatccagtctggtgttgagatggttactcttgggcttagacccaacatacaggaggtgttgaatgtcatgcctaccactgagacagctgtgggattgttaatctaattcctggaccattctgcagcttccattgtgaaatttcccagtgcctagcacctaagtgacttgacgggctcgcatggacccagcccacagatgggatattaacatattgctggatccagcacattgaggatgtaactctattctccttccttggcactgcccacagtgagcagtttgacatatcgctagaccttacacccaggtgatgtgagtctcctcttctgccttggcgctgccctcaggaagcgttgttatatatagcttggcctcgcatccaggttatgtgactctccggcttgtgcactgcccatatgggacactgtgttaatattgctgggtccactactcaggctatgtaacccaacagcctgggccctgccttacaggggcattgtgacatatctctgtgctcatcagccaggtgatgtgattctcttctcctgcctggtccctttacacagaagggattgtgacacgttgctgggcttagcaccaagttgatgttgatgtgaatcttctgcctggatcgagttcacagaaggcatcgtgacatacttctgggtgcatcacctatttgatgcaactctcctctcttaccagagcattgcccataagagagattgtgacatatccctgggtctagcactgggatgatgtgaattctccctgcctggggcatgcccacagaaggaagtgtgacttataactgggcacagcacaggggtgatgtgattcttctgcctggtccctacctacaggagtcattgtcaaatgtctctgggcccatcatctagactatgtgactctctacttcttcctagggcctgctcacataaggattgtgacatattacatgcccttcatcatgtgacttttctctcatgtctgggctctgtcttggagatgaatgtgacacatagctaggcctagcccctaggttctgtaacttctcgtttttcaaaatcctacccaccaggggcattgaaacatctctctgggcacttcacttaggtaatgttgccctgttgcctggagcctcccctctggggggtatggtgacatattgctggacacagtacctatgtgatattctctcctttcttgcctgggccttgtatacattatgtattctaatatatggctgggttcaatgactaggtgatgcaactcttatgcatagaccctacccacagggacattatgacatttctttagctctgactctcctctttttccttagccctgccaaaaagggaggtggtgacatataactggacctagcaaccagctaatatgagtctcctcttttgcctgcacccagcatattttaggtgttgtatcatatcctttgtctcaacacctgcaggatgaaaggctcctgcctgagcccagccatctgtcaaaattgtcattctcccacacgaacatggaccataattgaggttctgaaactcacacccagaggcagtcaaaagttggaaaattggctcttaaaagtggatgttgtccttaagtgggtttgtgactccctgaccaagatccaaaacacttgtgaggctgtgaatccactaagataactccgttttcaaaagggattaaggctctcatggaaaaaacccattcctccattgagattgtgacttatgcacatagatgcaacatacaggaggcgttcactctcatacccagaaccggaacttatgtgggattgttaatctcatccatggaccttcctgcaggtgtgattctgacgtacacctctagccagctcctgagtgatttgacatttttgcctgggtgtagcccacagatgagattgtgatatatccttgaatccagcatctaattaatatgcttctattctcctgtcttggcactgcccataatgggtatcctgacctaacactggtcctggcactttgttatgtgactctgtcctgtgctttgcccacatgagccattgtgacatattgctgggtccaacacccaggtgatgtaactcttgtctagactttgcctacagggggcattgtgacatatctctacactgaccacccaggtgatggcactcacttctcctgactgctacctgtttatagcagggattgttacaaatcgttgcgggcagactctaggtaatgtgactgtctttttacagagtgctacccacaggagccattgcaaaatatctgtgggcctctcacctaaatgtagtgactctttgcctgggctcatttctcaggggtattgtgacatatggctgacctcagcaccgaggtgaactgagtttcttctactgtagggctctgaccaaagagagattacaatgtatcaccgggcccagcacctgagctatttgactgtccgctcttggctgcgccctacatttattgtgtattgtgacatatcactgggtccaacacgtaggtaaggtgactcacctgcatgggccatttccccatgggtactatgaagtattttttgttcatcacttaggtgatgcaactctcctctttgccttgggccccacataatttagctattgtgatgtatcactgtgcgaatcacctagtcaataggaagcttctaccaagaccctgactactgagggccttgtgacatagctctgcatttatcacctagaaaatatgatccccccccatttctgcctgaaccctgctcacaagaaaaattgtagcatatttctgggcccagcaaacaggtgatgtgtttcacctgcctgtgcttagttcacagggaaaattgtgacatatcactgggcccagaacccaggtgaggtgactctgctgcatgtgtcgtgctttcaggagggaacaagaacatatccctggcagaactcttagggatgtgactctcttgccttgtccctgtcctcagggaagactgcaacatgtccctgacacagacccaggtgatgagactgtcctgcttctgactacccaaatgtgagattgtcacatatattttggcttagcatgtaggtgtgacgatgacattcataccttaaaccaaccaatagcagagatactttctctcacagccaggcttaacaaaacttgcaaaattatgggtcttctcttactatgaaggtcagagaaagtaagcactcttgcatatcctgtaaagcactcagatggtacagtgtcatcacagggcccagaacacaggtgagattgtgttctctgtgtgcacacccaccaatcatcagaattctcattcctacacaggaacagaggtgattagggaggtctaaacctcatacctgaatgccgtccacagttggaattgtaactatcatttgtgaacatccagtcacagtggggatagtgacttatttctgaacccagtttacagccaagtaaagatcctcttatctggatccagccagctggagagatgttgactctcatacctggacttatggccacaggtatgatcataggttcatatcagcatgaagacctcagagtggattatgtttaatgcatactctacaaggcccacaggaggtacatagtgtcctaacagggcccagcaaacaggtgagattctaacactcatgcacactctggtgacaataaaagttgccatcctcaaaaatgggcacaaccggcgtggctcagtggctcacacctgtaatcgcagcactttgggaagccgaggcggacagatcatgagatcaggagatcaagaccatcctggccaacatggtgaaaccacgtctctctactatttatgattatgattatgattatgattatgattatgattatgattattattttgagacagagtcttgctctgtcacccagactggagtgcagtggcaccatctaggcttactgcaacatccgcctcccgggttcaaacaattctcttgtttcagcttcccgagtagcagggagtacaggctcatgccaccattcccagctaatttttgtgtttttagtggagacggggtttcaccatattgattaggctggtctcaaactcctgacctcaggtgatccacccaactcgacctcccaaagtgctgggattacaggcatgggacactgtgcctgtccaccccatctctactaaaaatacaaaaattagctgagcgtcatggcacatacctgcaatcccagctactcgggaagctgaggcaagagagttgcttgaacccaggaggcagaggtttcagagagccgagatcgccccactgcactccagcctggcgatagagtgagactccgtctcaagggaccgaaagaagaaagaaagaaagaaagaaagaaagaaagaaagaaagaaagaaagaaagaaagaaagaaagagagagagagagaaagaaagaaagaaaggaaggaaggaaggaaggaaggaaggaaggaaggaaaagaaagaaagaaagaaagagaaagaaagaaaggaaaagaaagaatgaaagaagaaagaaagagaaagaaggaaggaaggaagaaagaaagaaaaagaaagaaagaaagaagaaagaaagaaaaaagaaagaaagaaagaaagaaagaaagaaagaaagaaagaaagaaagaaagaaagaaagagaaaattgactctcatatatggatcttgtccacaggtaggtgggtgactctcaaaccaaaattcattacatctgtgagactgtaactctcctaaggggagaagttcttctcagccagagaagactcatttatgaatccagttcactgttgagattgggactgttgtacctaggccaaacatacaaattctcatacctggaatccggacatgtgtggagttgttcatctcatccctgtcgctttctgcaggtgggattgtgacatacatctctgcccagctcctgagtgttttagctctgtttcctgtgtccagctcacagatgggattctgatatatcactgaagccagcacctaaatgatgtgactcttatctcctgccttggtgctgcccacaggggacattgggacatatcacttggccttgcacctaggtaatgtatgttttctgccttgcattagtgctactcacaggggtgttgtgatgtattgctgggtcccacatccatgttatgtgactcttctgcctgtgcccagtccacaatggccattttgacatattgttgcatccaaaacctagatgatttacctctccttcctgagctttgcctaaggggacattgtgaaatatctatgagcccatcacccatgtggcgtgattttcttctcctgcctagtccctgcttaaagaaaggattgtgacatatcactgtgcccagcacctatctcatgttactcttcttttgttttttaggatttgtttggaaggagattgtgatacattggtgggtccaacttctcagtgacattactctgttgactgtgctctgcaagcagaaagcactgtgacacattattgggcccaacaccaaggtgagtctcctgcctgaagcctgcctacagcaatttgtaacatatggcattgggacatatctctgagcccatcaactatttgacaagattctccttttttaacaaaggctttgcccataggagagattgtgacataattctgagccctgaaaataggggatatttcttttgttttctgcttgagccccacattgtgatgtatttctcctcccaacaactgagggaagggaaagtcctgcctgggtcttgcctatggggagccttgtgaaatctttccgtgttcatcaccttaaatatgtgaccctcatcttctgccatggccatgtttacagaagggagagtgggttattcctagacccagcacacaggtcatgtgattctgcatcctggtgtctccagaggggtcattttgacatatctctagactcatcaactagataatgtaatgctcctcttccccctgaaacctatccatagtggagattgtgaaatacagcctggcacagcacctacatgatggtactctcttctcatgcttgggtgctggccacaggggtgattaagacttatagctgggtacagtcttcaggtgatgtaactctcctctatttttgggcccacacacacagggaactaccatatagctctgctcctcagtcttaggtgatgtgactctgctgtctgttacctcctcttagggggaattgtgatatattgctgggcccagaaccgaggtgatgtggccttttctcttgcctgggccctgcatacatggtgtacagtaacatatatctgggttgaacacataggtgatgtgactcttctgcataggtcttgccaacaggggtattatgacatactcttctattcattgcctaggcgatgtgactctccactcttacctgggcccttccaaaagaggggattgtgacatatcactgaccctaacaccaaggtaatgtgactgttctcttttgcctgggtttgcatattttgggtattgtgacatatccctgggcccaacacttagggaataagaggtttattcctctaccttacgtgcagtgaagcttgtgacatatttctgcattcatcaccaagaagatgtgactcttctgcctgcatcctgaccacagagaggattgtgaaatattgctagatccagcatgcaggtgatgtgtctctgctgcctcgttcctaatgtgaggagtggattgcaacataccaatgcctgaacattcaggtaatgtgactgttgactggtccctgtcctcagggaagcgacatatcactgacccagcatccaactgattttactctcctgctctcttcctatatgcaggtgtaattgttacatatatcttggaacacaacacacaggtgcaatgatgacattcatatgtcaaaccagccaatagaagagatactgcttctcctagctacacttagggaaatgaaaaaaaaccctgggtctcctcgctaagatcatccactctctcatatattacagaaagtcctcaggtggtagagagtcttatcacagggcccagcacacaggtgaaatttgttactcctatgcgcaccctgaaccctcctgaccattatgattttcaccctcacatataaacagaacccactggtgaggtcctgaatttcacacatgaatgcagtttatagttggaattgcgaatctcatatgtaaagatctggccagagttggaatgggaacttcgttataaacccagcgcatagaaagctgatgactctcttatctggaccccgccaattgtaaagatgttgactcatatataggcttagggccacaggtttgatcatgggtccataccagcatgaaaatctctgaaagaattgagactgtcatgcatacaacataaagccgtcaggtgcaacacagaaagtcctaatagggctcagcacacagtaatataatgacattgggatgcacacccagccaacattaaagattgtcgttctttcacatgatcatagttcacttttgaggctctgaatcccatacccaaaggcagattgaaaagttgaaaaattgactctcatatttgagagtcacagatgtgttgatgactctcagatcatgagtcagcacacctaggaagctgtgatttcaattaggggacaaagtacgcaagagaaaatggggctgccatgcacaaatttagtccactattgagatagtgacttgtgtacttagatcaaacatacagaaggtgttcactctcatgcataaaaccagaatatgtgcgggattcatcccatatctggactttcctgcaggtgtcattgtgacaagcatacacatttgtccagcacctgagtgattagactcttctgtttaagcccagctcacaaataaaattgggacatatcattggacctagaacataggtgatgtggctctattctcttgacttcgtgctgcccacagggagcattgtaacgtatcactgaacttaacacctaggagattagaggctcctgcctgaactctgtccacagtgagccttgtagcatatttctgcttccaacaccagatgatgtgactctcctttctgcctgcaccttgcccacaggaaagattctgacatatcactgggcccagtaatcagtaatcaggtgatgtttctctcctgctatggccttgcccacagggagtgtggtgacatatcactgagctcaatattcaggtgatttgactctgctgcttgtactctgatttcaggaggggattgtaacatatcccctgtgagcacacaagtgatgggactcccctcctagcctctgacctcagaaaacattgttacatatccctggcccagccttaggtatgtgactctcctacctgttccctgccatcagggaagatattgacagatctcaggccaagcatcccggtgacgtgactctcctgctcactcccttcccacagaagagattgaaacatatatcttggccagctcacaggtgtaataatgactctcatacctcaaacctgccactaagagaaatactgtttttcatagggaggctttggaaaaccggtaggtcttaactcttcgttttgtatgaaggtcttagaggaatacaactctctcatattatataaagctcttaaatggtacaaagagtgttatcacagggatatgttgcataacctatgggaggggcccagttatatgtcacaattaacccagggggcagggcacaggcatgaaaagagagtcacaccacatatgtgctggcctaagtgatacatcatcatccccactgtggacaggtcgcagtaagaacaggagagtcacatcattctaataatggtctcagagatacatcacaatgactcccctgggcagaaacaagggataaggttcacatcacctgtgggctaggcccagagatgtcactcttacttctgtgggcatgtctcaggctggagaggagaatcacattacctaagcactggaccaagaaatacttcacaatctttctcatggcgaaagcccaggtaagagaatagagccatatcaaatagttcatgggctcagagatatgtcacaatgctccctgtgggcagggttcaggtaggacaatcacattaccttggtgcttgttcagcaatatatcccaaagccttctgagggcagagccaagataaaagagtaaaatcattttggtgttttacaaatcgatatgtcacaatctcccccgagggcagaacctgaaaaaagggaagagtcacattagctaaatgctgcgccgggtgataagtcacaattcaccctgtaggcagagactagacagaagatagagtcacatcatctagtggctggtgcagagatatgccaccatgccctctctaggcagagttcagacaggagagttatgtcacctgtgttttggacccagaaatatgtcacaaaagcccatggacagagcacaggaaagacaggcacataacctgaatatcagcttcagtggtatgacccaatgcctcctgtgagcgttccaaggcaggagaggagactcacattacctgtgtgcaaggcccagtgatacgtcacacggaggagtaccactgtcttgcatattgtgtaaactatggtagagaaattgtcaccacagggctcgccacactggtgagattatacttctcagatgcacaccacaccaatattcaggatggtctctatcacacgtggagagagcccactcttgaggtcctgaattacacatgcagacacagtccacaactgggattgtgactttcatatgtgaacatccagccacaggtgggatggtgactcatttttaaacgcagctcataggcagttaagaactcttatttggacccatccaagtagaaagatgttgactgtcataccagggcttaaagctaaaggtacaaggaggggtccgtgcctgcttaaggtttcagagagaattgttacactcatgcatactctataaaggctgcatatggtgaagagagtgtcctgacagggcccagaacaaaagtagattgtgacactcatatctacgctgagccaagagtaaaaattgtcatcttttcacatgaacacagcccattgttgaggttccaaatctcacacctggaggcggttgagagatgaataattgactctcataagtggatgcgatccatgtttgagtcagtgactctaaaaccaacattcagcaaacacgtgaggctgtgactccattaaggggccacggtcctcgggaaagactgaagctgccatgcacagatccagtgcaccattgagactgtgacttctacacttagacccaacaaacacaatgtgtttgctctcacacctagatatgggacatgtgcaggattgtcagtctcagccctggactttcctggaggtataactgtgaaatatatctcggcccagctcgtgagtgacttgactcttctgcgtagcccagcccatgataaaattgtgacattattgaacccagcacctatgacccccctcttctgcctgggtcctgtcaaaaagagagattgtaacaaatcactgggacaagcacccacatgatgtgactctcctcttttccctgggccctgcatattttgtatattgtgacatactgctgggcataatacctagggaattgatggctactgcctgagccctgttcacagggggccttgggacatctctctgcattcaccacctaaaaaaagtgtgtgcaccctgcctacaaagaagattgtagcagatcacttgtcttagcaaccaagtgatgcgagtctcctgtcctgccttggtgctgctcacaggggacattataacatatacttggtgctgcacccatgttttgtaatttttctgccaggggtctaccatataagctatattgctgggtccaacacccaggttatgcagctctcctttctgtgctctgcctacaggggacattgtgacttatctctgcacccatcactcaggtgatgtgacttgcttctgctgactgattcctgttcaagtggagattgtgacatatcaatggtggcaccatctagctgatgtaactattctcttctgcctaggttcttcctgcagtggaaattgtgatgtatcactgggcttaacaccaaagtgacattaattttttgccttggttcttccctcagaagacattgtaatatattgctgggctcagcaccaaaacgatgtggatttcctgtctggaccctgcatacaggagtccctgtgacatatctcttgactcatcaactatttgatgtgactctcctctgttccctgagctttgcctataggaaagcgtcagcctggactccagagtcagccacccacccctgcacagacaaggagaggtctcattaagcttcagcacagtctgggaccatagctttttttgtaacgatttgttcggcatgaggcccactcacaagggcccttcgtgactggactcaaggaaaacgaaaaggcctacttgtttttgcgattttctgttgtttttcaataactatttctcagaaacagtgctggatgaattccacaaggggttcacacaacctgttccaggacttagtgaccattgtttctgtccatgttcattgagttcaaatttaatatttaacttttcctcctcattcagcctcaatttgacactgaatcataggaaaatatttttacagttatacggggaagtcacaactggtatagattacagatagagcagaggagaattaaaagcacaattaatagaaaccacacccaccacggccaacgccaatgctagtttgacagccagtccatgatggggtcctgatggttagattctaactgttttacttgtccttgcatgtcttcggcaaggagagtaatactgcgagaactgtcagggatacacacaacattcagaatgcagcaagactcaaacccctccttgggctgcggtaaacatacctaatgccattcgattttgcaacacaacagtacacagctgaacaagttcttctgataacaacagaagtccagtgctactatcttaggagcttttactatatgtggacttaatattttaatttgttgctgaagcaggattgtacgaggggcaagggagaatactgtgatagttttccaccaccagggagtctggcacgttcataaccagctacctttgtaagcatctagattattggggaagggaatattatcccggatggtgaatggaattaatggcacccccaagtgaatctccccatccaataagggggcagataggccacccatagggtctgcatacccagagggccccccaggggacagcaatggttatactacaattatagtgtattaagatgttattaaagtagcaaaggaagtccaggttggattgcaagtgttgttgttttggccccatttgtagtgacagagccattcagaaatattggcaaggacaactctgcaaggcagtccatttcctgtggcctctggcaatttgatgcatagccagcattgactgcggttagcttctgtcgcagtggttgctgcccagttgatgaattcactctccacctcagacctgatgacccaggtactgattactagtagacaggttattctctgtaacaacaaaactgaaggggaacataatattgtttttcatttttaggaaactgtactacccttttattttctgctcccatacctacaaggtcacagccttaggggcgggatctgatggaggctgtatccatattttcgttccaggatttaagctacctataccagtggatcttaatttcccagttctgtacgtagcctctgttggggcagagatttcctcaggggttaattgttaacaaggtaccaggtaccactgacaattgagcaacccgaatctgcggtcttgtaacaaaagaatgtggagtggtattgtgtaaagtgaactttaactgttcctggtaatcattatcaattataccaccatacattataatgtgtctcatcgccaggcttgaatgtgttgtaatccattcacccacattcaagtttgcatttatgctggaaattttggcctgttgatctacctgctgtttagtctgtcaagagaatgcagagatgcatgagaatcaatatgaaaaacagcaataatagtaatgtgcatcaggattcaggtatcttcctagtattgttttctccaaacctctttattcattattcactatttgtttcattgccattcgggcaactaggtagtaagaccattttctgctgaccaacagtcggtatacaagcaacaaattgctctggcctcctcctgaatagttcggaggatggcttctagttcagccagctggctgctcacacccctcccttcatcagaaacgcttatgtttttaacaggattataagccacggcctcccagcatcaggtcccatcaatgtatttggtggaactatcagtaaccaagcgtgtttctgatcctctgggcttagttctttaaaggatttgccccattgggcaggggaggtttccttccctatatgcaggacttgccctgtggtttcctgagttggcaagttttgcacatcttcaagtaaaaatgataccgcttttagttctggcttatcctggtcttgtatgtaccatttccattttatgatactacattcttgagtgtaccctatccaatgggttttgagggagctcatgacccaagtcataataggaatttggggcctcataaaaacatcatgattaaaacaaaggtgttctgcttccttcaagcgcagtagaaggccaacagctgcttctcaaagagtataagctttgccagcctctggcagcttctgggtctaaaactccaaaggtatcttcttcccatcttgtttctacctaaggctccaattagcatgttgatgtaggacagttacttgcagttctgttgactcatcctataagggccatagatccagggccagttgctcagcttgttttgcttgttgaaaagccaggctgtctttctctctccagtgatattcatagtgttttctagtgactgcatgcagaggttgtaatatgttacccaagtggggaatatgatgtctccagaatccaaacaagccaatacaattttggacctccttttcagtggtagggctgcaaattctagtattttagcgttagcctttggtaaaatggactgtttccctgcagtccataggatgccaaggaactttacactttgtgcaggccattgaattttattagagttaacttcccatccttgagataggatttgggtttttaccctcttctgccctgaaaactgactagttattcagttttaccctgactgggcaactcggacagctgctttttcagcaataggctgatagctttgagcctgatcagtcaagacaggcctggcatggtaccagggtcagtctggaagtcagattaaaattttccttttccagcttacatttctcttgtaacaaccagtccctacattgacactttaacttataagaagtaagcaagcatcatcaatgctgggaaattccctcagcattacaattaccaactgggactccctgctgcacctcacgcacagccagtgattcaaacaaactttatcccacttaaatggcaatgcagatataataagcaaatatataagcaagttgcaatgggacggggagaagggaaaagatatatatatatatttaaactcaccaaactatggaggattcaccacaagactgtgaagcaacagcctgggctccagattggccactcatccgtccacagacaacgtgagatctcatgaagctttggcgcagtctggaaccccagctctttttgtaatgagttatttggcatgaagtccggtcaggaaggctattcacaacggggctcaaggaacacaaaaaggtcaacttgtttttttgattgtctattgtttttcaataactaagatataggaataaattgaaatagagatttatctgaaacagcgctggatgagggcttcaaggggctcacacaacctgttccgggacttggtgaccattgtttgagtccatgtccaatttagttcaaatttaatatttaccttttactccaaaaagtgtcaaaagtaattccttcaaatgcaggaaattatgtagctactcacaaactaaacttctcaaacaaaagtcataaatagagtacagagataaaaaataaaataaaatctaactacatctgtctacaggggattcaatttatttatttatttatttattttagagacatggtattgctttgtttcccaggctggtctcaaacttctgggctcaagttaacctcccacctcaatctcctaaaatgctcggatgacagatatgagccatcttactatatagtaacaaaaacagactaaaagtggcaagatgcatcaaaacaattttatgcaaatcgtaatgaaatgaagacaacgtcacgagcacattatgcaaaatactttttaaataactgtcttagtttataaaataaattataagttaaaactgtcaaagaaaacaaaggacaaaataataaaaaagtttattcactggaaacctaggaaaattatatacatttatataatatacatttatataattgtgtgtatttatctaattatgtatacagacacacatatatatgaacctcacatgaagattttaaaataaatcaataatattttgtcagaacataaacaaaaaactgcaatatactgagaacaatattttaatacaccagttctgtaattaataataaagccagagagaatgttaagaagaaaacagaggacatgaaaatactgtaaaacagttagatgtaacagatgcatagagatcactctacacaacaacaaaactcacagtcttgtcaaaagctcataaaacattgtcctaaaaataaatataaggaaaaaaattttttaacagaattaaaaaaaattgaatgttacagaaaacacttcaaaaaatcaatcaacccaggagccggttttttgaaaagattaacaaaatagatagaccactagtaagacaaataaaggagaaaagagagaagaatcaaagagacgcaataaaaaacgacaaaggggatatcaccacgaaacccacagaaatacaaactaccatcagagaatactataaacacctctacggaaataaagtggaaaacctagaagaaattgataaattcctggaaacatccacacctccaagactaaacgaggaagaagttgaatctctgagtagaccaatagcaggttctgaaattgaggcaataattaatagcttatgaaccaaaaaaagtccatgaccagacgaattcacaacggaattctaccagaggtacaaagaggagctgctaccatcccttctgaaactattcgaatcaagagaaaaagagggaatcttccttaactcattttatgaggtcagcatcatcctgataccaaagcctggcagaagcacaacaaaaaaacaatatccctgatgaacatcaatgcaaacatcctcaataaaatgctgacaaaccaaatccagcagcacatccaaaagcttacccaccacgatcaattcagcttcatccctgggatgcaagcctggttcaacatatgcaaatcaataaacataattcatcacataaacagaaccaatgacaaaaatctcatgactatctcaatagatgcagaaaaggccttcaacaaaactcaacagcctttcatgataaaaactctaaataaactaggtattgatggaacacatctgaaaataataagagctatttatgacaaacccacagccaatatcatgcagaatgggcaaaacctggaagcattccctttgaaaaccagcacaagacaacgatgccctctctcaccactcccactcaacatagtattggaagttctggccagggccatcaggcaagagaaagaaataaaggacattcgattaggaaaaagaggaagccaaattgtctctgtttgcagatgacatgattgtatatttagaaaaccccattgtctcagcccaaaatctccttaaatctgataagcaacttcagcaaagtctcaggatacaaaataatgtgcaaaaatcacaagtatttccatacaccaataacagatgaacagagagccaaattatgagtgaactcccactcaacaattgctacaaagagaataaaatacctaggaatccaacttacaagggatgtgaaggacattttcaaggagaactacaaaccactgctccatgaaataaaagcggacacaaacaaatggaagaacattccatgctcctggaaaggaagaatcaatatcatgaaaatgaccatgctgcccaagataacttacagattcaatgctatccccatcaagctaccactgactttcttcacagaattggaaaaaactactttgaagttcacatggaaccaaaaaacagcctgcataggcaagaaaatcctacacaaaaagagaaaagctgcaggtatcacactacctgacttcaatctatactacaggtctacagtaacaaaaacagcatggtactggtaccaaaacagatatatagagcaatggaaaaaaacagaggcctcagaaataccatcacacatctacaaccattggatcnnnnnnnnnnnnnnnnnnnnnnnnnnnnnnnnnnnnnnnnnnnnnnnnnnnnnnnnnnnnnnnnnnnnnnnnnnnnnnnnnnnnnnnnnnnnnnnnnnnnnnnnnnnnnnnnnnnnnnnnnnnnnnnnnnnnnnnnnnnnnnnnnnnnnnnnnnnnnnnnnnnnnnnnnnnnnnnnnnnnnnnnnnnnnnnnnnnnnnnnnnnnnnnnnnnnnnnnnnnnnnnnnnnnnnnnnnnnnnnnnnnnnnnnnnnnnnnnnnnnnnnnnnnnnnnnnnnnnnnnnnnnnnnnnnnnnnnnnnnnnnnnnnnnnnnnnnnnnnnnnnnnnnnnnnnnnnnnnnnnnnnnnnnnnnnnnnnnnnnnnnnnnnnnnnnnnnnnnnnnnnnnnnnnnnnnnnnnnnnnnnnnnnnnnnnnnnnnnnnnnnnnnnnnnnnnnnnnnnnnnnnnnnnnnnnnnnnnnnnnnnnnnnnnnnnnnnnnnnnnnnnnnnnnnnnnnnnnnnnnnnnnnnnnnnnnnnnnnnnnnnnnnnnnnnnnnnnnnnnnnnnnnnnnnnnnnnnnnnnnnnnnnnnnnnnnnnnnnnnnnnnnnnnnnnnnnnnnnnnnnnnnnnnnnnnnnnnnnnnnnnnnnnnnnnnnnnnnnnnnnnnnnnnnnnnnnnnnnnnnnnnnnnnnnnnnnnnnnnnnnnnnnnnnnnnnnnnnnnnnnnnnnnnnnnnnnnnnnnnnnnnnnnnnnnnnnnnnnnnnnnnnnnnnnnnnnnnnnnnnnnnnnnnnnnnnnnnnnnnnnnnnnnnnnnnnnnnnnnnnnnnnnnnnnnnnnnnnnnnnnnnnnnnnnnnnnnnnnnnnnnnnnnnnnnnnnnnnnnnnnnnnnnnnnnnnnnnnnnnnnnnnnnnnnnnnnnnnnnnnnnnnnnnnnnnnnnnnnnnnnnnnnnnnnnnnnnnnnnnnnnnnnnnnnnnnnnnnnnnnnnnnnnnnnnnnnnnnnnnnnnnnnnnnnnnnnnnnnnnnnnnnnnnnnnnnnnnnnnnnnnnnnnnnnnnnnnnnnnnnnnnnnnnnnnnnnnnnnnnnnnnnnnnnnnnnnnnnnnnnnnnnnnnnnnnnnnnnnnnnnnnnnnnnnnnnnnnnnnnnnnnnnnnnnnnnnnnnnnnnnnnnnnnnnnnnnnnnnnnnnnnnnnnnnnnnnnnnnnnnnnnnnnnnnnnnnnnnnnnnnnnnnnnnnnnnnnnnnnnnnnnnnnnnnnnnnnnnnnnnnnnnnnnnnnnnnnnnnnnnnnnnnnnnnnnnnnnnnnnnnnnnnnnnnnnnnnnnnnnnnnnnnnnnnnnnnnnnnnnnnnnnnnnnnnnnnnnnnnnnnnnnnnnnnnnnnnnnnnnnnnnnnnnnnnnnnnnnnnnnnnnnnnnnnnnnnnnnnnnnnnnnnnnnnnnnnnnnnnnnnnnnnnnnnnnnnnnnnnnnnnnnnnnnnnnnnnnnnnnnnnnnnnnnnnnnnnnnnnnnnnnnnnnnnnnnnnnnnnnnnnnnnnnnnnnnnnnnnnnnnnnnnnnnnnnnnnnnnnnnnnnnnnnnnnnnnnnnnnnnnnnnnnnnnnnnnnnnnnnnnnnnnnnnnnnnnnnnnnnnnnnnnnnnnnnnnnnnnnnnnnnnnnnnnnnnnnnnnnnnnnnnnnnnnnnnnnnnnnnnnnnnnnnnnnnnnnnnnnnnnnnnnnnnnnnnnnnnnnnnnnnnnnnnnnnnnnnnnnnnnnnnnnnnnnnnnnnnnnnnnnnnnnnnnnnnnnnnnnnnnnnnnnnnnnnnnnnnnnnnnnnnnnnnnnnnnnnnnnnnnnnnnnnnnnnnnnnnnnnnnnnnnnnnnnnnnnnnnnnnnnnnnnnnnnnnnnnnnnnnnnnnnnnnnnnnnnnnnnnnnnnnnnnnnnnnnnnnnnnnnnnnnnnnnnnnnnnnnnnnnnnnnnnnnnnnnnnnnnnnnnnnnnnnnnnnnnnnnnnnnnnnnnnnnnnnnnnnnnnnnnnnnnnnnnnnnnnnnnnnnnnnnnnnnnnnnnnnnnnnnnnnnnnnnnnnnnnnnnnnnnnnnnnnnnnnnnnnnnnnnnnnnnnnnnnnnnnnnnnnnnnnnnnnnnnnnnnnnnnnnnnnnnnnnnnnnnnnnnnnnnnnnnnnnnnnnnnnnnnnnnnnnnnnnnnnnnnnnnnnnnnnnnnnnnnnnnnnnnnnnnnnnnnnnnnnnnnnnnnnnnnnnnnnnnnnnnnnnnnnnnnnnnnnnnnnnnnnnnnnnnnnnnnnnnnnnnnnnnnnnnnnnnnnnnnnnnnnnnnnnnnnnnnnnnnnnnnnnnnnnnnnnnnnnnnnnnnnnnnnnnnnnnnnnnnnnnnnnnnnnnnnnnnnnnnnnnnnnnnnnnnnnnnnnnnnnnnnnnnnnnnnnnnnnnnnnnnnnnnnnnnnnnnnnnnnnnnnnnnnnnnnnnnnnnnnnnnnnnnnnnnnnnnnnnnnnnnnnnnnnnnnnnnnnnnnnnnnnnnnnnnnnnnnnnnnnnnnnnnnnnnnnnnnnnnnnnnnnnnnnnnnnnnnnnnnnnnnnnnnnnnnnnnnnnnnnnnnnnnnnnnnnnnnnnnnnnnnnnnnnnnnnnnnnnnnnnnnnnnnnnnnnnnnnnnnnnnnnnnnnnnnnnnnnnnnnnnnnnnnnnnnnnnnnnnnnnnnnnnnnnnnnnnnnnnnnnnnnnnnnnnnnnnnnnnnnnnnnnnnnnnnnnnnnnnnnnnnnnnnnnnnnnnnnnnnnnnnnnnnnnnnnnnnnnnnnnnnnnnnnnnnnnnnnnnnnnnnnnnnnnnnnnnnnnnnnnnnnnnnnnnnnnnnnnnnnnnnnnnnnnnnnnnnnnnnnnnnnnnnnnnnnnnnnnnnnnnnnnnnnnnnnnnnnnnnnnnnnnnnnnnnnnnnnnnnnnnnnnnnnnnnnnnnnnnnnnnnnnnnnnnnnnnnnnnnnnnnnnnnnnnnnnnnnnnnnnnnnnnnnnnnnnnnnnnnnnnnnnnnnnnnnnnnnnnnnnnnnnnnnnnnnnnnnnnnnnnnnnnnnnnnnnnnnnnnnnnnnnnnnnnnnnnnnnnnnnnnnnnnnnnnnnnnnnnnnnnnnnnnnnnnnnnnnnnnnnnnnnnnnnnnnnnnnnnnnnnnnnnnnnnnnnnnnnnnnnnnnnnnnnnnnnnnnnnnnnnnnnnnnnnnnnnnnnnnnnnnnnnnnnnnnnnnnnnnnnnnnnnnnnnnnnnnnnnnnnnnnnnnnnnnnnnnnnnnnnnnnnnnnnnnnnnnnnnnnnnnnnnnnnnnnnnnnnnnnnnnnnnnnnnnnnnnnnnnnnnnnnnnnnnnnnnnnnnnnnnnnnnnnnnnnnnnnnnnnnnnnnnnnnnnnnnnnnnnnnnnnnnnnnnnnnnnnnnnnnnnnnnnnnnnnnnnnnnnnnnnnnnnnnnnnnnnnnnnnnnnnnnnnnnnnnnnnnnnnnnnnnnnnnnnnnnnnnnnnnnnnnnnnnnnnnnnnnnnnnnnnnnnnnnnnnnnnnnnnnnnnnnnnnnnnnnnnnnnnnnnnnnnnnnnnnnnnnnnnnnnnnnnnnnnnnnnnnnnnnnnnnnnnnnnnnnnnnnnnnnnnnnnnnnnnnnnnnnnnnnnnnnnnnnnnnnnnnnnnnnnnnnnnnnnnnnnnnnnnnnnnnnnnnnnnnnnnnnnnnnnnnnnnnnnnnnnnnnnnnnnnnnnnnnnnnnnnnnnnnnnnnnnnnnnnnnnnnnnnnnnnnnnnnnnnnnnnnnnnnnnnnnnnnnnnnnnnnnnnnnnnnnnnnnnnnnnnnnnnnnnnnnnnnnnnnnnnnnnnnnnnnnnnnnnnnnnnnnnnnnnnnnnnnnnnnnnnnnnnnnnnnnnnnnnnnnnnnnnnnnnnnnnnnnnnnnnnnnnnnnnnnnnnnnnnnnnnnnnnnnnnnnnnnnnnnnnnnnnnnnnnnnnnnnnnnnnnnnnnnnnnnnnnnnnnnnnnnnnnnnnnnnnnnnnnnnnnnnnnnnnnnnnnnnnnnnnnnnnnnnnnnnnnnnnnnnnnnnnnnnnnnnnnnnnnnnnnnnnnnnnnnnnnnnnnnnnnnnnnnnnnnnnnnnnnnnnnnnnnnnnnnnnnnnnnnnnnnnnnnnnnnnnnnnnnnnnnnnnnnnnnnnnnnnnnnnnnnnnnnnnnnnnnnnnnnnnnnnnnnnnnnnnnnnnnnnnnnnnnnnnnnnnnnnnnnnnnnnnnnnnnnnnnnnnnnnnnnnnnnnnnnnnnnnnnnnnnnnnnnnnnnnnnnnnnnnnnnnnnnnnnnnnnnnnnnnnnnnnnnnnnnnnnnnnnnnnnnnnnnnnnnnnnnnnnnnnnnnnnnnnnnnnnnnnnnnnnnnnnnnnnnnnnnnnnnnnnnnnnnnnnnnnnnnnnnnnnnnnnnnnnnnnnnnnnnnnnnnnnnnnnnnnnnnnnnnnnnnnnnnnnnnnnnnnnnnnnnnnnnnnnnnnnnnnnnnnnnnnnnnnnnnnnnnnnnnnnnnnnnnnnnnnnnnnnnnnnnnnnnnnnnnnnnnnnnnnnnnnnnnnnnnnnnnnnnnnnnnnnnnnnnnnnnnnnnnnnnnnnnnnnnnnnnnnnnnnnnnnnnnnnnnnnnnnnnnnnnnnnnnnnnnnnnnnnnnnnnnnnnnnnnnnnnnnnnnnnnnnnnnnnnnnnnnnnnnnnnnnnnnnnnnnnnnnnnnnnnnnnnnnnnnnnnnnnnnnnnnnnnnnnnnnnnnnnnnnnnnnnnnnnnnnnnnnnnnnnnnnnnnnnnnnnnnnnnnnnnnnnnnnnnnnnnnnnnnnnnnnnnnnnnnnnnnnnnnnnnnnnnnnnnnnnnnnnnnnnnnnnnnnnnnnnnnnnnnnnnnnnnnnnnnnnnnnnnnnnnnnnnnnnnnnnnnnnnnnnnnnnnnnnnnnnnnnnnnnnnnnnnnnnnnnnnnnnnnnnnnnnnnnnnnnnnnnnnnnnnnnnnnnnnnnnnnnnnnnnnnnnnnnnnnnnnnnnnnnnnnnnnnnnnnnnnnnnnnnnnnnnnnnnnnnnnnnnnnnnnnnnnnnnnnnnnnnnnnnnnnnnnnnnnnnnnnnnnnnnnnnnnnnnnnnnnnnnnnnnnnnnnnnnnnnnnnnnnnnnnnnnnnnnnnnnnnnnnnnnnnnnnnnnnnnnnnnnnnnnnnnnnnnnnnnnnnnnnnnnnnnnnnnnnnnnnnnnnnnnnnnnnnnnnnnnnnnnnnnnnnnnnnnnnnnnnnnnnnnnnnnnnnnnnnnnnnnnnnnnnnnnnnnnnnnnnnnnnnnnnnnnnnnnnnnnnnnnnnnnnnnnnnnnnnnnnnnnnnnnnnnnnnnnnnnnnnnnnnnnnnnnnnnnnnnnnnnnnnnnnnnnnnnnnnnnnnnnnnnnnnnnnnnnnnnnnnnnnnnnnnnnnnnnnnnnnnnnnnnnnnnnnnnnnnnnnnnnnnnnnnnnnnnnnnnnnnnnnnnnnnnnnnnnnnnnnnnnnnnnnnnnnnnnnnnnnnnnnnnnnnnnnnnnnnnnnnnnnnnnnnnnnnnnnnnnnnnnnnnnnnnnnnnnnnnnnnnnnnnnnnnnnnnnnnnnnnnnnnnnnnnnnnnnnnnnnnnnnnnnnnnnnnnnnnnnnnnnnnnnnnnnnnnnnnnnnnnnnnnnnnnnnnnnnnnnnnnnnnnnnnnnnnnnnnnnnnnnnnnnnnnnnnnnnnnnnnnnnnnnnnnnnnnnnnnnnnnnnnnnnnnnnnnnnnnnnnnnnnnnnnnnnnnnnnnnnnnnnnnnnnnnnnnnnnnnnnnnnnnnnnnnnnnnnnnnnnnnnnnnnnnnnnnnnnnnnnnnnnnnnnnnnnnnnnnnnnnnnnnnnnnnnnnnnnnnnnnnnnnnnnnnnnnnnnnnnnnnnnnnnnnnnnnnnnnnnnnnnnnnnnnnnnnnnnnnnnnnnnnnnnnnnnnnnnnnnnnnnnnnnnnnnnnnnnnnnnnnnnnnnnnnnnnnnnnnnnnnnnnnnnnnnnnnnnnnnnnnnnnnnnnnnnnnnnnnnnnnnnnnnnnnnnnnnnnnnnnnnnnnnnnnnnnnnnnnnnnnnnnnnnnnnnnnnnnnnnnnnnnnnnnnnnnnnnnnnnnnnnnnnnnnnnnnnnnnnnnnnnnnnnnnnnnnnnnnnnnnnnnnnnnnnnnnnnnnnnnnnnnnnnnnnnnnnnnnnnnnnnnnnnnnnnnnnnnnnnnnnnnnnnnnnnnnnnnnnnnnnnnnnnnnnnnnnnnnnnnnnnnnnnnnnnnnnnnnnnnnnnnnnnnnnnnnnnnnnnnnnnnnnnnnnnnnnnnnnnnnnnnnnnnnnnnnnnnnnnnnnnnnnnnnnnnnnnnnnnnnnnnnnnnnnnnnnnnnnnnnnnnnnnnnnnnnnnnnnnnnnnnnnnnnnnnnnnnnnnnnnnnnnnnnnnnnnnnnnnnnnnnnnnnnnnnnnnnnnnnnnnnnnnnnnnnnnnnnnnnnnnnnnnnnnnnnnnnnnnnnnnnnnnnnnnnnnnnnnnnnnnnnnnnnnnnnnnnnnnnnnnnnnnnnnnnnnnnnnnnnnnnnnnnnnnnnnnnnnnnnnnnnnnnnnnnnnnnnnnnnnnnnnnnnnnnnnnnnnnnnnnnnnnnnnnnnnnnnnnnnnnnnnnnnnnnnnnnnnnnnnnnnnnnnnnnnnnnnnnnnnnnnnnnnnnnnnnnnnnnnnnnnnnnnnnnnnnnnnnnnnnnnnnnnnnnnnnnnnnnnnnnnnnnnnnnnnnnnnnnnnnnnnnnnnnnnnnnnnnnnnnnnnnnnnnnnnnnnnnnnnnnnnnnnnnnnnnnnnnnnnnnnnnnnnnnnnnnnnnnnnnnnnnnnnnnnnnnnnnnnnnnnnnnnnnnnnnnnnnnnnnnnnnnnnnnnnnnnnnnnnnnnnnnnnnnnnnnnnnnnnnnnnnnnnnnnnnnnnnnnnnnnnnnnnnnnnnnnnnnnnnnnnnnnnnnnnnnnnnnnnnnnnnnnnnnnnnnnnnnnnnnnnnnnnnnnnnnnnnnnnnnnnnnnnnnnnnnnnnnnnnnnnnnnnnnnnnnnnnnnnnnnnnnnnnnnnnnnnnnnnnnnnnnnnnnnnnnnnnnnnnnnnnnnnnnnnnnnnnnnnnnnnnnnnnnnnnnnnnnnnnnnnnnnnnnnnnnnnnnnnnnnnnnnnnnnnnnnnnnnnnnnnnnnnnnnnnnnnnnnnnnnnnnnnnnnnnnnnnnnnnnnnnnnnnnnnnnnnnnnnnnnnnnnnnnnnnnnnnnnnnnnnnnnnnnnnnnnnnnnnnnnnnnnnnnnnnnnnnnnnnnnnnnnnnnnnnnnnnnnnnnnnnnnnnnnnnnnnnnnnnnnnnnnnnnnnnnnnnnnnnnnnnnnnnnnnnnnnnnnnnnnnnnnnnnnnnnnnnnnnnnnnnnnnnnnnnnnnnnnnnnnnnnnnnnnnnnnnnnnnnnnnnnnnnnnnnnnnnnnnnnnnnnnnnnnnnnnnnnnnnnnnnnnnnnnnnnnnnnnnnnnnnnnnnnnnnnnnnnnnnnnnnnnnnnnnnnnnnnnnnnnnnnnnnnnnnnnnnnnnnnnnnnnnnnnnnnnnnnnnnnnnnnnnnnnnnnnnnnnnnnnnnnnnnnnnnnnnnnnnnnnnnnnnnnnnnnnnnnnnnnnnnnnnnnnnnnnnnnnnnnnnnnnnnnnnnnnnnnnnnnnnnnnnnnnnnnnnnnnnnnnnnnnnnnnnnnnnnnnnnnnnnnnnnnnnnnnnnnnnnnnnnnnnnnnnnnnnnnnnnnnnnnnnnnnnnnnnnnnnnnnnnnnnnnnnnnnnnnnnnnnnnnnnnnnnnnnnnnnnnnnnnnnnnnnnnnnnnnnnnnnnnnnnnnnnnnnnnnnnnnnnnnnnnnnnnnnnnnnnnnnnnnnnnnnnnnnnnnnnnnnnnnnnnnnnnnnnnnnnnnnnnnnnnnnnnnnnnnnnnnnnnnnnnnnnnnnnnnnnnnnnnnnnnnnnnnnnnnnnnnnnnnnnnnnnnnnnnnnnnnnnnnnnnnnnnnnnnnnnnnnnnnnnnnnnnnnnnnnnnnnnnnnnnnnnnnnnnnnnnnnnnnnnnnnnnnnnnnnnnnnnnnnnnnnnnnnnnnnnnnnnnnnnnnnnnnnnnnnnnnnnnnnnnnnnnnnnnnnnnnnnnnnnnnnnnnnnnnnnnnnnnnnnnnnnnnnnnnnnnnnnnnnnnnnnnnnnnnnnnnnnnnnnnnnnnnnnnnnnnnnnnnnnnnnnnnnnnnnnnnnnnnnnnnnnnnnnnnnnnnnnnnnnnnnnnnnnnnnnnnnnnnnnnnnnnnnnnnnnnnnnnnnnnnnnnnnnnnnnnnnnnnnnnnnnnnnnnnnnnnnnnnnnnnnnnnnnnnnnnnnnnnnnnnnnnnnnnnnnnnnnnnnnnnnnnnnnnnnnnnnnnnnnnnnnnnnnnnnnnnnnnnnnnnnnnnnnnnnnnnnnnnnnnnnnnnnnnnnnnnnnnnnnnnnnnnnnnnnnnnnnnnnnnnnnnnnnnnnnnnnnnnnnnnnnnnnnnnnnnnnnnnnnnnnnnnnnnnnnnnnnnnnnnnnnnnnnnnnnnnnnnnnnnnnnnnnnnnnnnnnnnnnnnnnnnnnnnnnnnnnnnnnnnnnnnnnnnnnnnnnnnnnnnnnnnnnnnnnnnnnnnnnnnnnnnnnnnnnnnnnnnnnnnnnnnnnnnnnnnnnnnnnnnnnnnnnnnnnnnnnnnnnnnnnnnnnnnnnnnnnnnnnnnnnnnnnnnnnnnnnnnnnnnnnnnnnnnnnnnnnnnnnnnnnnnnnnnnnnnnnnnnnnnnnnnnnnnnnnnnnnnnnnnnnnnnnnnnnnnnnnnnnnnnnnnnnnnnnnnnnnnnnnnnnnnnnnnnnnnnnnnnnnnnnnnnnnnnnnnnnnnnnnnnnnnnnnnnnnnnnnnnnnnnnnnnnnnnnnnnnnnnnnnnnnnnnnnnnnnnnnnnnnnnnnnnnnnnnnnnnnnnnnnnnnnnnnnnnnnnnnnnnnnnnnnnnnnnnnnnnnnnnnnnnnnnnnnnnnnnnnnnnnnnnnnnnnnnnnnnnnnnnnnnnnnnnnnnnnnnnnnnnnnnnnnnnnnnnnnnnnnnnnnnnnnnnnnnnnnnnnnnnnnnnnnnnnnnnnnnnnnnnnnnnnnnnnnnnnnnnnnnnnnnnnnnnnnnnnnnnnnnnnnnnnnnnnnnnnnnnnnnnnnnnnnnnnnnnnnnnnnnnnnnnnnnnnnnnnnnnnnnnnnnnnnnnnnnnnnnnnnnnnnnnnnnnnnnnnnnnnnnnnnnnnnnnnnnnnnnnnnnnnnnnnnnnnnnnnnnnnnnnnnnnnnnnnnnnnnnnnnnnnnnnnnnnnnnnnnnnnnnnnnnnnnnnnnnnnnnnnnnnnnnnnnnnnnnnnnnnnnnnnnnnnnnnnnnnnnnnnnnnnnnnnnnnnnnnnnnnnnnnnnnnnnnnnnnnnnnnnnnnnnnnnnnnnnnnnnnnnnnnnnnnnnnnnnnnnnnnnnnnnnnnnnnnnnnnnnnnnnnnnnnnnnnnnnnnnnnnnnnnnnnnnnnnnnnnnnnnnnnnnnnnnnnnnnnnnnnnnnnnnnnnnnnnnnnnnnnnnnnnnnnnnnnnnnnnnnnnnnnnnnnnnnnnnnnnnnnnnnnnnnnnnnnnnnnnnnnnnnnnnnnnnnnnnnnnnnnnnnnnnnnnnnnnnnnnnnnnnnnnnnnnnnnnnnnnnnnnnnnnnnnnnnnnnnnnnnnnnnnnnnnnnnnnnnnnnnnnnnnnnnnnnnnnnnnnnnnnnnnnnnnnnnnnnnnnnnnnnnnnnnnnnnnnnnnnnnnnnnnnnnnnnnnnnnnnnnnnnnnnnnnnnnnnnnnnnnnnnnnnnnnnnnnnnnnnnnnnnnnnnnnnnnnnnnnnnnnnnnnnnnnnnnnnnnnnnnnnnnnnnnnnnnnnnnnnnnnnnnnnnnnnnnnnnnnnnnnnnnnnnnnnnnnnnnnnnnnnnnnnnnnnnnnnnnnnnnnnnnnnnnnnnnnnnnnnnnnnnnnnnnnnnnnnnnnnnnnnnnnnnnnnnnnnnnnnnnnnnnnnnnnnnnnnnnnnnnnnnnnnnnnnnnnnnnnnnnnnnnnnnnnnnnnnnnnnnnnnnnnnnnnnnnnnnnnnnnnnnnnnnnnnnnnnnnnnnnnnnnnnnnnnnnnnnnnnnnnnnnnnnnnnnnnnnnnnnnnnnnnnnnnnnnnnnnnnnnnnnnnnnnnnnnnnnnnnnnnnnnnnnnnnnnnnnnnnnnnnnnnnnnnnnnnnnnnnnnnnnnnnnnnnnnnnnnnnnnnnnnnnnnnnnnnnnnnnnnnnnnnnnnnnnnnnnnnnnnnnnnnnnnnnnnnnnnnnnnnnnnnnnnnnnnnnnnnnnnnnnnnnnnnnnnnnnnnnnnnnnnnnnnnnnnnnnnnnnnnnnnnnnnnnnnnnnnnnnnnnnnnnnnnnnnnnnnnnnnnnnnnnnnnnnnnnnnnnnnnnnnnnnnnnnnnnnnnnnnnnnnnnnnnnnnnnnnnnnnnnnnnnnnnnnnnnnnnnnnnnnnnnnnnnnnnnnnnnnnnnnnnnnnnnnnnnnnnnnnnnnnnnnnnnnnnnnnnnnnnnnnnnnnnnnnnnnnnnnnnnnnnnnnnnnnnnnnnnnnnnnnnnnnnnnnnnnnnnnnnnnnnnnnnnnnnnnnnnnnnnnnnnnnnnnnnnnnnnnnnnnnnnnnnnnnnnnnnnnnnnnnnnnnnnnnnnnnnnnnnnnnnnnnnnnnnnnnnnnnnnnnnnnnnnnnnnnnnnnnnnnnnnnnnnnnnnnnnnnnnnnnnnnnnnnnnnnnnnnnnnnnnnnnnnnnnnnnnnnnnnnnnnnnnnnnnnnnnnnnnnnnnnnnnnnnnnnnnnnnnnnnnnnnnnnnnnnnnnnnnnnnnnnnnnnnnnnnnnnnnnnnnnnnnnnnnnnnnnnnnnnnnnnnnnnnnnnnnnnnnnnnnnnnnnnnnnnnnnnnnnnnnnnnnnnnnnnnnnnnnnnnnnnnnnnnnnnnnnnnnnnnnnnnnnnnnnnnnnnnnnnnnnnnnnnnnnnnnnnnnnnnnnnnnnnnnnnnnnnnnnnnnnnnnnnnnnnnnnnnnnnnnnnnnnnnnnnnnnnnnnnnnnnnnnnnnnnnnnnnnnnnnnnnnnnnnnnnnnnnnnnnnnnnnnnnnnnnnnnnnnnnnnnnnnnnnnnnnnnnnnnnnnnnnnnnnnnnnnnnnnnnnnnnnnnnnnnnnnnnnnnnnnnnnnnnnnnnnnnnnnnnnnnnnnnnnnnnnnnnnnnnnnnnnnnnnnnnnnnnnnnnnnnnnnnnnnnnnnnnnnnnnnnnnnnnnnnnnnnnnnnnnnnnnnnnnnnnnnnnnnnnnnnnnnnnnnnnnnnnnnnnnnnnnnnnnnnnnnnnnnnnnnnnnnnnnnnnnnnnnnnnnnnnnnnnnnnnnnnnnnnnnnnnnnnnnnnnnnnnnnnnnnnnnnnnnnnnnnnnnnnnnnnnnnnnnnnnnnnnnnnnnnnnnnnnnnnnnnnnnnnnnnnnnnnnnnnnnnnnnnnnnnnnnnnnnnnnnnnnnnnnnnnnnnnnnnnnnnnnnnnnnnnnnnnnnnnnnnnnnnnnnnnnnnnnnnnnnnnnnnnnnnnnnnnnnnnnnnnnnnnnnnnnnnnnnnnnnnnnnnnnnnnnnnnnnnnnnnnnnnnnnnnnnnnnnnnnnnnnnnnnnnnnnnnnnnnnnnnnnnnnnnnnnnnnnnnnnnnnnnnnnnnnnnnnnnnnnnnnnnnnnnnnnnnnnnnnnnnnnnnnnnnnnnnnnnnnnnnnnnnnnnnnnnnnnnnnnnnnnnnnnnnnnnnnnnnnnnnnnnnnnnnnnnnnnnnnnnnnnnnnnnnnnnnnnnnnnnnnnnnnnnnnnnnnnnnnnnnnnnnnnnnnnnnnnnnnnnnnnnnnnnnnnnnnnnnnnnnnnnnnnnnnnnnnnnnnnnnnnnnnnnnnnnnnnnnnnnnnnnnnnnnnnnnnnnnnnnnnnnnnnnnnnnnnnnnnnnnnnnnnnnnnnnnnnnnnnnnnnnnnnnnnnnnnnnnnnnnnnnnnnnnnnnnnnnnnnnnnnnnnnnnnnnnnnnnnnnnnnnnnnnnnnnnnnnnnnnnnnnnnnnnnnnnnnnnnnnnnnnnnnnnnnnnnnnnnnnnnnnnnnnnnnnnnnnnnnnnnnnnnnnnnnnnnnnnnnnnnnnnnnnnnnnnnnnnnnnnnnnnnnnnnnnnnnnnnnnnnnnnnnnnnnnnnnnnnnnnnnnnnnnnnnnnnnnnnnnnnnnnnnnnnnnnnnnnnnnnnnnnnnnnnnnnnnnnnnnnnnnnnnnnnnnnnnnnnnnnnnnnnnnnnnnnnnnnnnnnnnnnnnnnnnnnnnnnnnnnnnnnnnnnnnnnnnnnnnnnnnnnnnnnnnnnnnnnnnnnnnnnnnnnnnnnnnnnnnnnnnnnnnnnnnnnnnnnnnnnnnnnnnnnnnnnnnnnnnnnnnnnnnnnnnnnnnnnnnnnnnnnnnnnnnnnnnnnnnnnnnnnnnnnnnnnnnnnnnnnnnnnnnnnnnnnnnnnnnnnnnnnnnnnnnnnnnnnnnnnnnnnnnnnnnnnnnnnnnnnnnnnnnnnnnnnnnnnnnnnnnnnnnnnnnnnnnnnnnnnnnnnnnnnnnnnnnnnnnnnnnnnnnnnnnnnnnnnnnnnnnnnnnnnnnnnnnnnnnnnnnnnnnnnnnnnnnnnnnnnnnnnnnnnnnnnnnnnnnnnnnnnnnnnnnnnnnnnnnnnnnnnnnnnnnnnnnnnnnnnnnnnnnnnnnnnnnnnnnnnnnnnnnnnnnnnnnnnnnnnnnnnnnnnnnnnnnnnnnnnnnnnnnnnnnnnnnnnnnnnnnnnnnnnnnnnnnnnnnnnnnnnnnnnnnnnnnnnnnnnnnnnnnnnnnnnnnnnnnnnnnnnnnnnnnnnnnnnnnnnnnnnnnnnnnnnnnnnnnnnnnnnnnnnnnnnnnnnnnnnnnnnnnnnnnnnnnnnnnnnnnnnnnnnnnnnnnnnnnnnnnnnnnnnnnnnnnnnnnnnnnnnnnnnnnnnnnnnnnnnnnnnnnnnnnnnnnnnnnnnnnnnnnnnnnnnnnnnnnnnnnnnnnnnnnnnnnnnnnnnnnnnnnnnnnnnnnnnnnnnnnnnnnnnnnnnnnnnnnnnnnnnnnnnnnnnnnnnnnnnnnnnnnnnnnnnnnnnnnnnnnnnnnnnnnnnnnnnnnnnnnnnnnnnnnnnnnnnnnnnnnnnnnnnnnnnnnnnnnnnnnnnnnnnnnnnnnnnnnnnnnnnnnnnnnnnnnnnnnnnnnnnnnnnnnnnnnnnnnnnnnnnnnnnnnnnnnnnnnnnnnnnnnnnnnnnnnnnnnnnnnnnnnnnnnnnnnnnnnnnnnnnnnnnnnnnnnnnnnnnnnnnnnnnnnnnnnnnnnnnnnnnnnnnnnnnnnnnnnnnnnnnnnnnnnnnnnnnnnnnnnnnnnnnnnnnnnnnnnnnnnnnnnnnnnnnnnnnnnnnnnnnnnnnnnnnnnnnnnnnnnnnnnnnnnnnnnnnnnnnnnnnnnnnnnnnnnnnnnnnnnnnnnnnnnnnnnnnnnnnnnnnnnnnnnnnnnnnnnnnnnnnnnnnnnnnnnnnnnnnnnnnnnnnnnnnnnnnnnnnnnnnnnnnnnnnnnnnnnnnnnnnnnnnnnnnnnnnnnnnnnnnnnnnnnnnnnnnnnnnnnnnnnnnnnnnnnnnnnnnnnnnnnnnnnnnnnnnnnnnnnnnnnnnnnnnnnnnnnnnnnnnnnnnnnnnnnnnnnnnnnnnnnnnnnnnnnnnnnnnnnnnnnnnnnnnnnnnnnnnnnnnnnnnnnnnnnnnnnnnnnnnnnnnnnnnnnnnnnnnnnnnnnnnnnnnnnnnnnnnnnnnnnnnnnnnnnnnnnnnnnnnnnnnnnnnnnnnnnnnnnnnnnnnnnnnnnnnnnnnnnnnnnnnnnnnnnnnnnnnnnnnnnnnnnnnnnnnnnnnnnnnnnnnnnnnnnnnnnnnnnnnnnnnnnnnnnnnnnnnnnnnnnnnnnnnnnnnnnnnnnnnnnnnnnnnnnnnnnnnnnnnnnnnnnnnnnnnnnnnnnnnnnnnnnnnnnnnnnnnnnnnnnnnnnnnnnnnnnnnnnnnnnnnnnnnnnnnnnnnnnnnnnnnnnnnnnnnnnnnnnnnnnnnnnnnnnnnnnnnnnnnnnnnnnnnnnnnnnnnnnnnnnnnnnnnnnnnnnnnnnnnnnnnnnnnnnnnnnnnnnnnnnnnnnnnnnnnnnnnnnnnnnnnnnnnnnnnnnnnnnnnnnnnnnnnnnnnnnnnnnnnnnnnnnnnnnnnnnnnnnnnnnnnnnnnnnnnnnnnnnnnnnnnnnnnnnnnnnnnnnnnnnnnnnnnnnnnnnnnnnnnnnnnnnnnnnnnnnnnnnnnnnnnnnnnnnnnnnnnnnnnnnnnnnnnnnnnnnnnnnnnnnnnnnnnnnnnnnnnnnnnnnnnnnnnnnnnnnnnnnnnnnnnnnnnnnnnnnnnnnnnnnnnnnnnnnnnnnnnnnnnnnnnnnnnnnnnnnnnnnnnnnnnnnnnnnnnnnnnnnnnnnnnnnnnnnnnnnnnnnnnnnnnnnnnnnnnnnnnnnnnnnnnnnnnnnnnnnnnnnnnnnnnnnnnnnnnnnnnnnnnnnnnnnnnnnnnnnnnnnnnnnnnnnnnnnnnnnnnnnnnnnnnnnnnnnnnnnnnnnnnnnnnnnnnnnnnnnnnnnnnnnnnnnnnnnnnnnnnnnnnnnnnnnnnnnnnnnnnnnnnnnnnnnnnnnnnnnnnnnnnnnnnnnnnnnnnnnnnnnnnnnnnnnnnnnnnnnnnnnnnnnnnnnnnnnnnnnnnnnnnnnnnnnnnnnnnnnnnnnnnnnnnnnnnnnnnnnnnnnnnnnnnnnnnnnnnnnnnnnnnnnnnnnnnnnnnnnnnnnnnnnnnnnnnnnnnnnnnnnnnnnnnnnnnnnnnnnnnnnnnnnnnnnnnnnnnnnnnnnnnnnnnnnnnnnnnnnnnnnnnnnnnnnnnnnnnnnnnnnnnnnnnnnnnnnnnnnnnnnnnnnnnnnnnnnnnnnnnnnnnnnnnnnnnnnnnnnnnnnnnnnnnnnnnnnnnnnnnnnnnnnnnnnnnnnnnnnnnnnnnnnnnnnnnnnnnnnnnnnnnnnnnnnnnnnnnnnnnnnnnnnnnnnnnnnnnnnnnnnnnnnnnnnnnnnnnnnnnnnnnnnnnnnnnnnnnnnnnnnnnnnnnnnnnnnnnnnnnnnnnnnnnnnnnnnnnnnnnnnnnnnnnnnnnnnnnnnnnnnnnnnnnnnnnnnnnnnnnnnnnnnnnnnnnnnnnnnnnnnnnnnnnnnnnnnnnnnnnnnnnnnnnnnnnnnnnnnnnnnnnnnnnnnnnnnnnnnnnnnnnnnnnnnnnnnnnnnnnnnnnnnnnnnnnnnnnnnnnnnnnnnnnnnnnnnnnnnnnnnnnnnnnnnnnnnnnnnnnnnnnnnnnnnnnnnnnnnnnnnnnnnnnnnnnnnnnnnnnnnnnnnnnnnnnnnnnnnnnnnnnnnnnnnnnnnnnnnnnnnnnnnnnnnnnnnnnnnnnnnnnnnnnnnnnnnnnnnnnnnnnnnnnnnnnnnnnnnnnnnnnnnnnnnnnnnnnnnnnnnnnnnnnnnnnnnnnnnnnnnnnnnnnnnnnnnnnnnnnnnnnnnnnnnnnnnnnnnnnnnnnnnnnnnnnnnnnnnnnnnnnnnnnnnnnnnnnnnnnnnnnnnnnnnnnnnnnnnnnnnnnnnnnnnnnnnnnnnnnnnnnnnnnnnnnnnnnnnnnnnnnnnnnnnnnnnnnnnnnnnnnnnnnnnnnnnnnnnnnnnnnnnnnnnnnnnnnnnnnnnnnnnnnnnnnnnnnnnnnnnnnnnnnnnnnnnnnnnnnnnnnnnnnnnnnnnnnnnnnnnnnnnnnnnnnnnnnnnnnnnnnnnnnnnnnnnnnnnnnnnnnnnnnnnnnnnnnnnnnnnnnnnnnnnnnnnnnnnnnnnnnnnnnnnnnnnnnnnnnnnnnnnnnnnnnnnnnnnnnnnnnnnnnnnnnnnnnnnnnnnnnnnnnnnnnnnnnnnnnnnnnnnnnnnnnnnnnnnnnnnnnnnnnnnnnnnnnnnnnnnnnnnnnnnnnnnnnnnnnnnnnnnnnnnnnnnnnnnnnnnnnnnnnnnnnnnnnnnnnnnnnnnnnnnnnnnnnnnnnnnnnnnnnnnnnnnnnnnnnnnnnnnnnnnnnnnnnnnnnnnnnnnnnnnnnnnnnnnnnnnnnnnnnnnnnnnnnnnnnnnnnnnnnnnnnnnnnnnnnnnnnnnnnnnnnnnnnnnnnnnnnnnnnnnnnnnnnnnnnnnnnnnnnnnnnnnnnnnnnnnnnnnnnnnnnnnnnnnnnnnnnnnnnnnnnnnnnnnnnnnnnnnnnnnnnnnnnnnnnnnnnnnnnnnnnnnnnnnnnnnnnnnnnnnnnnnnnnnnnnnnnnnnnnnnnnnnnnnnnnnnnnnnnnnnnnnnnnnnnnnnnnnnnnnnnnnnnnnnnnnnnnnnnnnnnnnnnnnnnnnnnnnnnnnnnnnnnnnnnnnnnnnnnnnnnnnnnnnnnnnnnnnnnnnnnnnnnnnnnnnnnnnnnnnnnnnnnnnnnnnnnnnnnnnnnnnnnnnnnnnnnnnnnnnnnnnnnnnnnnnnnnnnnnnnnnnnnnnnnnnnnnnnnnnnnnnnnnnnnnnnnnnnnnnnnnnnnnnnnnnnnnnnnnnnnnnnnnnnnnnnnnnnnnnnnnnnnnnnnnnnnnnnnnnnnnnnnnnnnnnnnnnnnnnnnnnnnnnnnnnnnnnnnnnnnnnnnnnnnnnnnnnnnnnnnnnnnnnnnnnnnnnnnnnnnnnnnnnnnnnnnnnnnnnnnnnnnnnnnnnnnnnnnnnnnnnnnnnnnnnnnnnnnnnnnnnnnnnnnnnnnnnnnnnnnnnnnnnnnnnnnnnnnnnnnnnnnnnnnnnnnnnnnnnnnnnnnnnnnnnnnnnnnnnnnnnnnnnnnnnnnnnnnnnnnnnnnnnnnnnnnnnnnnnnnnnnnnnnnnnnnnnnnnnnnnnnnnnnnnnnnnnnnnnnnnnnnnnnnnnnnnnnnnnnnnnnnnnnnnnnnnnnnnnnnnnnnnnnnnnnnnnnnnnnnnnnnnnnnnnnnnnnnnnnnnnnnnnnnnnnnnnnnnnnnnnnnnnnnnnnnnnnnnnnnnnnnnnnnnnnnnnnnnnnnnnnnnnnnnnnnnnnnnnnnnnnnnnnnnnnnnnnnnnnnnnnnnnnnnnnnnnnnnnnnnnnnnnnnnnnnnnnnnnnnnnnnnnnnnnnnnnnnnnnnnnnnnnnnnnnnnnnnnnnnnnnnnnnnnnnnnnnnnnnnnnnnnnnnnnnnnnnnnnnnnnnnnnnnnnnnnnnnnnnnnnnnnnnnnnnnnnnnnnnnnnnnnnnnnnnnnnnnnnnnnnnnnnnnnnnnnnnnnnnnnnnnnnnnnnnnnnnnnnnnnnnnnnnnnnnnnnnnnnnnnnnnnnnnnnnnnnnnnnnnnnnnnnnnnnnnnnnnnnnnnnnnnnnnnnnnnnnnnnnnnnnnnnnnnnnnnnnnnnnnnnnnnnnnnnnnnnnnnnnnnnnnnnnnnnnnnnnnnnnnnnnnnnnnnnnnnnnnnnnnnnnnnnnnnnnnnnnnnnnnnnnnnnnnnnnnnnnnnnnnnnnnnnnnnnnnnnnnnnnnnnnnnnnnnnnnnnnnnnnnnnnnnnnnnnnnnnnnnnnnnnnnnnnnnnnnnnnnnnnnnnnnnnnnnnnnnnnnnnnnnnnnnnnnnnnnnnnnnnnnnnnnnnnnnnnnnnnnnnnnnnnnnnnnnnnnnnnnnnnnnnnnnnnnnnnnnnnnnnnnnnnnnnnnnnnnnnnnnnnnnnnnnnnnnnnnnnnnnnnnnnnnnnnnnnnnnnnnnnnnnnnnnnnnnnnnnnnnnnnnnnnnnnnnnnnnnnnnnnnnnnnnnnnnnnnnnnnnnnnnnnnnnnnnnnnnnnnnnnnnnnnnnnnnnnnnnnnnnnnnnnnnnnnnnnnnnnnnnnnnnnnnnnnnnnnnnnnnnnnnnnnnnnnnnnnnnnnnnnnnnnnnnnnnnnnnnnnnnnnnnnnnnnnnnnnnnnnnnnnnnnnnnnnnnnnnnnnnnnnnnnnnnnnnnnnnnnnnnnnnnnnnnnnnnnnnnnnnnnnnnnnnnnnnnnnnnnnnnnnnnnnnnnnnnnnnnnnnnnnnnnnnnnnnnnnnnnnnnnnnnnnnnnnnnnnnnnnnnnnnnnnnnnnnnnnnnnnnnnnnnnnnnnnnnnnnnnnnnnnnnnnnnnnnnnnnnnnnnnnnnnnnnnnnnnnnnnnnnnnnnnnnnnnnnnnnnnnnnnnnnnnnnnnnnnnnnnnnnnnnnnnnnnnnnnnnnnnnnnnnnnnnnnnnnnnnnnnnnnnnnnnnnnnnnnnnnnnnnnnnnnnnnnnnnnnnnnnnnnnnnnnnnnnnnnnnnnnnnnnnnnnnnnnnnnnnnnnnnnnnnnnnnnnnnnnnnnnnnnnnnnnnnnnnnnnnnnnnnnnnnnnnnnnnnnnnnnnnnnnnnnnnnnnnnnnnnnnnnnnnnnnnnnnnnnnnnnnnnnnnnnnnnnnnnnnnnnnnnnnnnnnnnnnnnnnnnnnnnnnnnnnnnnnnnnnnnnnnnnnnnnnnnnnnnnnnnnnnnnnnnnnnnnnnnnnnnnnnnnnnnnnnnnnnnnnnnnnnnnnnnnnnnnnnnnnnnnnnnnnnnnnnnnnnnnnnnnnnnnnnnnnnnnnnnnnnnnnnnnnnnnnnnnnnnnnnnnnnnnnnnnnnnnnnnnnnnnnnnnnnnnnnnnnnnnnnnnnnnnnnnnnnnnnnnnnnnnnnnnnnnnnnnnnnnnnnnnnnnnnnnnnnnnnnnnnnnnnnnnnnnnnnnnnnnnnnnnnnnnnnnnnnnnnnnnnnnnnnnnnnnnnnnnnnnnnnnnnnnnnnnnnnnnnnnnnnnnnnnnnnnnnnnnnnnnnnnnnnnnnnnnnnnnnnnnnnnnnnnnnnnnnnnnnnnnnnnnnnnnnnnnnnnnnnnnnnnnnnnnnnnnnnnnnnnnnnnnnnnnnnnnnnnnnnnnnnnnnnnnnnnnnnnnnnnnnnnnnnnnnnnnnnnnnnnnnnnnnnnnnnnnnnnnnnnnnnnnnnnnnnnnnnnnnnnnnnnnnnnnnnnnnnnnnnnnnnnnnnnnnnnnnnnnnnnnnnnnnnnnnnnnnnnnnnnnnnnnnnnnnnnnnnnnnnnnnnnnnnnnnnnnnnnnnnnnnnnnnnnnnnnnnnnnnnnnnnnnnnnnnnnnnnnnnnnnnnnnnnnnnnnnnnnnnnnnnnnnnnnnnnnnnnnnnnnnnnnnnnnnnnnnnnnnnnnnnnnnnnnnnnnnnnnnnnnnnnnnnnnnnnnnnnnnnnnnnnnnnnnnnnnnnnnnnnnnnnnnnnnnnnnnnnnnnnnnnnnnnnnnnnnnnnnnnnnnnnnnnnnnnnnnnnnnnnnnnnnnnnnnnnnnnnnnnnnnnnnnnnnnnnnnnnnnnnnnnnnnnnnnnnnnnnnnnnnnnnnnnnnnnnnnnnnnnnnnnnnnnnnnnnnnnnnnnnnnnnnnnnnnnnnnnnnnnnnnnnnnnnnnnnnnnnnnnnnnnnnnnnnnnnnnnnnnnnnnnnnnnnnnnnnnnnnnnnnnnnnnnnnnnnnnnnnnnnnnnnnnnnnnnnnnnnnnnnnnnnnnnnnnnnnnnnnnnnnnnnnnnnnnnnnnnnnnnnnnnnnnnnnnnnnnnnnnnnnnnnnnnnnnnnnnnnnnnnnnnnnnnnnnnnnnnnnnnnnnnnnnnnnnnnnnnnnnnnnnnnnnnnnnnnnnnnnnnnnnnnnnnnnnnnnnnnnnnnnnnnnnnnnnnnnnnnnnnnnnnnnnnnnnnnnnnnnnnnnnnnnnnnnnnnnnnnnnnnnnnnnnnnnnnnnnnnnnnnnnnnnnnnnnnnnnnnnnnnnnnnnnnnnnnnnnnnnnnnnnnnnnnnnnnnnnnnnnnnnnnnnnnnnnnnnnnnnnnnnnnnnnnnnnnnnnnnnnnnnnnnnnnnnnnnnnnnnnnnnnnnnnnnnnnnnnnnnnnnnnnnnnnnnnnnnnnnnnnnnnnnnnnnnnnnnnnnnnnnnnnnnnnnnnnnnnnnnnnnnnnnnnnnnnnnnnnnnnnnnnnnnnnnnnnnnnnnnnnnnnnnnnnnnnnnnnnnnnnnnnnnnnnnnnnnnnnnnnnnnnnnnnnnnnnnnnnnnnnnnnnnnnnnnnnnnnnnnnnnnnnnnnnnnnnnnnnnnnnnnnnnnnnnnnnnnnnnnnnnnnnnnnnnnnnnnnnnnnnnnnnnnnnnnnnnnnnnnnnnnnnnnnnnnnnnnnnnnnnnnnnnnnnnnnnnnnnnnnnnnnnnnnnnnnnnnnnnnnnnnnnnnnnnnnnnnnnnnnnnnnnnnnnnnnnnnnnnnnnnnnnnnnnnnnnnnnnnnnnnnnnnnnnnnnnnnnnnnnnnnnnnnnnnnnnnnnnnnnnnnnnnnnnnnnnnnnnnnnnnnnnnnnnnnnnnnnnnnnnnnnnnnnnnnnnnnnnnnnnnnnnnnnnnnnnnnnnnnnnnnnnnnnnnnnnnnnnnnnnnnnnnnnnnnnnnnnnnnnnnnnnnnnnnnnnnnnnnnnnnnnnnnnnnnnnnnnnnnnnnnnnnnnnnnnnnnnnnnnnnnnnnnnnnnnnnnnnnnnnnnnnnnnnnnnnnnnnnnnnnnnnnnnnnnnnnnnnnnnnnnnnnnnnnnnnnnnnnnnnnnnnnnnnnnnnnnnnnnnnnnnnnnnnnnnnnnnnnnnnnnnnnnnnnnnnnnnnnnnnnnnnnnnnnnnnnnnnnnnnnnnnnnnnnnnnnnnnnnnnnnnnnnnnnnnnnnnnnnnnnnnnnnnnnnnnnnnnnnnnnnnnnnnnnnnnnnnnnnnnnnnnnnnnnnnnnnnnnnnnnnnnnnnnnnnnnnnnnnnnnnnnnnnnnnnnnnnnnnnnnnnnnnnnnnnnnnnnnnnnnnnnnnnnnnnnnnnnnnnnnnnnnnnnnnnnnnnnnnnnnnnnnnnnnnnnnnnnnnnnnnnnnnnnnnnnnnnnnnnnnnnnnnnnnnnnnnnnnnnnnnnnnnnnnnnnnnnnnnnnnnnnnnnnnnnnnnnnnnnnnnnnnnnnnnnnnnnnnnnnnnnnnnnnnnnnnnnnnnnnnnnnnnnnnnnnnnnnnnnnnnnnnnnnnnnnnnnnnnnnnnnnnnnnnnnnnnnnnnnnnnnnnnnnnnnnnnnnnnnnnnnnnnnnnnnnnnnnnnnnnnnnnnnnnnnnnnnnnnnnnnnnnnnnnnnnnnnnnnnnnnnnnnnnnnnnnnnnnnnnnnnnnnnnnnnnnnnnnnnnnnnnnnnnnnnnnnnnnnnnnnnnnnnnnnnnnnnnnnnnnnnnnnnnnnnnnnnnnnnnnnnnnnnnnnnnnnnnnnnnnnnnnnnnnnnnnnnnnnnnnnnnnnnnnnnnnnnnnnnnnnnnnnnnnnnnnnnnnnnnnnnnnnnnnnnnnnnnnnnnnnnnnnnnnnnnnnnnnnnnnnnnnnnnnnnnnnnnnnnnnnnnnnnnnnnnnnnnnnnnnnnnnnnnnnnnnnnnnnnnnnnnnnnnnnnnnnnnnnnnnnnnnnnnnnnnnnnnnnnnnnnnnnnnnnnnnnnnnnnnnnnnnnnnnnnnnnnnnnnnnnnnnnnnnnnnnnnnnnnnnnnnnnnnnnnnnnnnnnnnnnnnnnnnnnnnnnnnnnnnnnnnnnnnnnnnnnnnnnnnnnnnnnnnnnnnnnnnnnnnnnnnnnnnnnnnnnnnnnnnnnnnnnnnnnnnnnnnnnnnnnnnnnnnnnnnnnnnnnnnnnnnnnnnnnnnnnnnnnnnnnnnnnnnnnnnnnnnnnnnnnnnnnnnnnnnnnnnnnnnnnnnnnnnnnnnnnnnnnnnnnnnnnnnnnnnnnnnnnnnnnnnnnnnnnnnnnnnnnnnnnnnnnnnnnnnnnnnnnnnnnnnnnnnnnnnnnnnnnnnnnnnnnnnnnnnnnnnnnnnnnnnnnnnnnnnnnnnnnnnnnnnnnnnnnnnnnnnnnnnnnnnnnnnnnnnnnnnnnnnnnnnnnnnnnnnnnnnnnnnnnnnnnnnnnnnnnnnnnnnnnnnnnnnnnnnnnnnnnnnnnnnnnnnnnnnnnnnnnnnnnnnnnnnnnnnnnnnnnnnnnnnnnnnnnnnnnnnnnnnnnnnnnnnnnnnnnnnnnnnnnnnnnnnnnnnnnnnnnnnnnnnnnnnnnnnnnnnnnnnnnnnnnnnnnnnnnnnnnnnnnnnnnnnnnnnnnnnnnnnnnnnnnnnnnnnnnnnnnnnnnnnnnnnnnnnnnnnnnnnnnnnnnnnnnnnnnnnnnnnnnnnnnnnnnnnnnnnnnnnnnnnnnnnnnnnnnnnnnnnnnnnnnnnnnnnnnnnnnnnnnnnnnnnnnnnnnnnnnnnnnnnnnnnnnnnnnnnnnnnnnnnnnnnnnnnnnnnnnnnnnnnnnnnnnnnnnnnnnnnnnnnnnnnnnnnnnnnnnnnnnnnnnnnnnnnnnnnnnnnnnnnnnnnnnnnnnnnnnnnnnnnnnnnnnnnnnnnnnnnnnnnnnnnnnnnnnnnnnnnnnnnnnnnnnnnnnnnnnnnnnnnnnnnnnnnnnnnnnnnnnnnnnnnnnnnnnnnnnnnnnnnnnnnnnnnnnnnnnnnnnnnnnnnnnnnnnnnnnnnnnnnnnnnnnnnnnnnnnnnnnnnnnnnnnnnnnnnnnnnnnnnnnnnnnnnnnnnnnnnnnnnnnnnnnnnnnnnnnnnnnnnnnnnnnnnnnnnnnnnnnnnnnnnnnnnnnnnnnnnnnnnnnnnnnnnnnnnnnnnnnnnnnnnnnnnnnnnnnnnnnnnnnnnnnnnnnnnnnnnnnnnnnnnnnnnnnnnnnnnnnnnnnnnnnnnnnnnnnnnnnnnnnnnnnnnnnnnnnnnnnnnnnnnnnnnnnnnnnnnnnnnnnnnnnnnnnnnnnnnnnnnnnnnnnnnnnnnnnnnnnnnnnnnnnnnnnnnnnnnnnnnnnnnnnnnnnnnnnnnnnnnnnnnnnnnnnnnnnnnnnnnnnnnnnnnnnnnnnnnnnnnnnnnnnnnnnnnnnnnnnnnnnnnnnnnnnnnnnnnnnnnnnnnnnnnnnnnnnnnnnnnnnnnnnnnnnnnnnnnnnnnnnnnnnnnnnnnnnnnnnnnnnnnnnnnnnnnnnnnnnnnnnnnnnnnnnnnnnnnnnnnnnnnnnnnnnnnnnnnnnnnnnnnnnnnnnnnnnnnnnnnnnnnnnnnnnnnnnnnnnnnnnnnnnnnnnnnnnnnnnnnnnnnnnnnnnnnnnnnnnnnnnnnnnnnnnnnnnnnnnnnnnnnnnnnnnnnnnnnnnnnnnnnnnnnnnnnnnnnnnnnnnnnnnnnnnnnnnnnnnnnnnnnnnnnnnnnnnnnnnnnnnnnnnnnnnnnnnnnnnnnnnnnnnnnnnnnnnnnnnnnnnnnnnnnnnnnnnnnnnnnnnnnnnnnnnnnnnnnnnnnnnnnnnnnnnnnnnnnnnnnnnnnnnnnnnnnnnnnnnnnnnnnnnnnnnnnnnnnnnnnnnnnnnnnnnnnnnnnnnnnnnnnnnnnnnnnnnnnnnnnnnnnnnnnnnnnnnnnnnnnnnnnnnnnnnnnnnnnnnnnnnnnnnnnnnnnnnnnnnnnnnnnnnnnnnnnnnnnnnnnnnnnnnnnnnnnnnnnnnnnnnnnnnnnnnnnnnnnnnnnnnnnnnnnnnnnnnnnnnnnnnnnnnnnnnnnnnnnnnnnnnnnnnnnnnnnnnnnnnnnnnnnnnnnnnnnnnnnnnnnnnnnnnnnnnnnnnnnnnnnnnnnnnnnnnnnnnnnnnnnnnnnnnnnnnnnnnnnnnnnnnnnnnnnnnnnnnnnnnnnnnnnnnnnnnnnnnnnnnnnnnnnnnnnnnnnnnnnnnnnnnnnnnnnnnnnnnnnnnnnnnnnnnnnnnnnnnnnnnnnnnnnnnnnnnnnnnnnnnnnnnnnnnnnnnnnnnnnnnnnnnnnnnnnnnnnnnnnnnnnnnnnnnnnnnnnnnnnnnnnnnnnnnnnnnnnnnnnnnnnnnnnnnnnnnnnnnnnnnnnnnnnnnnnnnnnnnnnnnnnnnnnnnnnnnnnnnnnnnnnnnnnnnnnnnnnnnnnnnnnnnnnnnnnnnnnnnnnnnnnnnnnnnnnnnnnnnnnnnnnnnnnnnnnnnnnnnnnnnnnnnnnnnnnnnnnnnnnnnnnnnnnnnnnnnnnnnnnnnnnnnnnnnnnnnnnnnnnnnnnnnnnnnnnnnnnnnnnnnnnnnnnnnnnnnnnnnnnnnnnnnnnnnnnnnnnnnnnnnnnnnnnnnnnnnnnnnnnnnnnnnnnnnnnnnnnnnnnnnnnnnnnnnnnnnnnnnnnnnnnnnnnnnnnnnnnnnnnnnnnnnnnnnnnnnnnnnnnnnnnnnnnnnnnnnnnnnnnnnnnnnnnnnnnnnnnnnnnnnnnnnnnnnnnnnnnnnnnnnnnnnnnnnnnnnnnnnnnnnnnnnnnnnnnnnnnnnnnnnnnnnnnnnnnnnnnnnnnnnnnnnnnnnnnnnnnnnnnnnnnnnnnnnnnnnnnnnnnnnnnnnnnnnnnnnnnnnnnnnnnnnnnnnnnnnnnnnnnnnnnnnnnnnnnnnnnnnnnnnnnnnnnnnnnnnnnnnnnnnnnnnnnnnnnnnnnnnnnnnnnnnnnnnnnnnnnnnnnnnnnnnnnnnnnnnnnnnnnnnnnnnnnnnnnnnnnnnnnnnnnnnnnnnnnnnnnnnnnnnnnnnnnnnnnnnnnnnnnnnnnnnnnnnnnnnnnnnnnnnnnnnnnnnnnnnnnnnnnnnnnnnnnnnnnnnnnnnnnnnnnnnnnnnnnnnnnnnnnnnnnnnnnnnnnnnnnnnnnnnnnnnnnnnnnnnnnnnnnnnnnnnnnnnnnnnnnnnnnnnnnnnnnnnnnnnnnnnnnnnnnnnnnnnnnnnnnnnnnnnnnnnnnnnnnnnnnnnnnnnnnnnnnnnnnnnnnnnnnnnnnnnnnnnnnnnnnnnnnnnnnnnnnnnnnnnnnnnnnnnnnnnnnnnnnnnnnnnnnnnnnnnnnnnnnnnnnnnnnnnnnnnnnnnnnnnnnnnnnnnnnnnnnnnnnnnnnnnnnnnnnnnnnnnnnnnnnnnnnnnnnnnnnnnnnnnnnnnnnnnnnnnnnnnnnnnnnnnnnnnnnnnnnnnnnnnnnnnnnnnnnnnnnnnnnnnnnnnnnnnnnnnnnnnnnnnnnnnnnnnnnnnnnnnnnnnnnnnnnnnnnnnnnnnnnnnnnnnnnnnnnnnnnnnnnnnnnnnnnnnnnnnnnnnnnnnnnnnnnnnnnnnnnnnnnnnnnnnnnnnnnnnnnnnnnnnnnnnnnnnnnnnnnnnnnnnnnnnnnnnnnnnnnnnnnnnnnnnnnnnnnnnnnnnnnnnnnnnnnnnnnnnnnnnnnnnnnnnnnnnnnnnnnnnnnnnnnnnnnnnnnnnnnnnnnnnnnnnnnnnnnnnnnnnnnnnnnnnnnnnnnnnnnnnnnnnnnnnnnnnnnnnnnnnnnnnnnnnnnnnnnnnnnnnnnnnnnnnnnnnnnnnnnnnnnnnnnnnnnnnnnnnnnnnnnnnnnnnnnnnnnnnnnnnnnnnnnnnnnnnnnnnnnnnnnnnnnnnnnnnnnnnnnnnnnnnnnnnnnnnnnnnnnnnnnnnnnnnnnnnnnnnnnnnnnnnnnnnnnnnnnnnnnnnnnnnnnnnnnnnnnnnnnnnnnnnnnnnnnnnnnnnnnnnnnnnnnnnnnnnnnnnnnnnnnnnnnnnnnnnnnnnnnnnnnnnnnnnnnnnnnnnnnnnnnnnnnnnnnnnnnnnnnnnnnnnnnnnnnnnnnnnnnnnnnnnnnnnnnnnnnnnnnnnnnnnnnnnnnnnnnnnnnnnnnnnnnnnnnnnnnnnnnnnnnnnnnnnnnnnnnnnnnnnnnnnnnnnnnnnnnnnnnnnnnnnnnnnnnnnnnnnnnnnnnnnnnnnnnnnnnnnnnnnnnnnnnnnnnnnnnnnnnnnnnnnnnnnnnnnnnnnnnnnnnnnnnnnnnnnnnnnnnnnnnnnnnnnnnnnnnnnnnnnnnnnnnnnnnnnnnnnnnnnnnnnnnnnnnnnnnnnnnnnnnnnnnnnnnnnnnnnnnnnnnnnnnnnnnnnnnnnnnnnnnnnnnnnnnnnnnnnnnnnnnnnnnnnnnnnnnnnnnnnnnnnnnnnnnnnnnnnnnnnnnnnnnnnnnnnnnnnnnnnnnnnnnnnnnnnnnnnnnnnnnnnnnnnnnnnnnnnnnnnnnnnnnnnnnnnnnnnnnnnnnnnnnnnnnnnnnnnnnnnnnnnnnnnnnnnnnnnnnnnnnnnnnnnnnnnnnnnnnnnnnnnnnnnnnnnnnnnnnnnnnnnnnnnnnnnnnnnnnnnnnnnnnnnnnnnnnnnnnnnnnnnnnnnnnnnnnnnnnnnnnnnnnnnnnnnnnnnnnnnnnnnnnnnnnnnnnnnnnnnnnnnnnnnnnnnnnnnnnnnnnnnnnnnnnnnnnnnnnnnnnnnnnnnnnnnnnnnnnnnnnnnnnnnnnnnnnnnnnnnnnnnnnnnnnnnnnnnnnnnnnnnnnnnnnnnnnnnnnnnnnnnnnnnnnnnnnnnnnnnnnnnnnnnnnnnnnnnnnnnnnnnnnnnnnnnnnnnnnnnnnnnnnnnnnnnnnnnnnnnnnnnnnnnnnnnnnnnnnnnnnnnnnnnnnnnnnnnnnnnnnnnnnnnnnnnnnnnnnnnnnnnnnnnnnnnnnnnnnnnnnnnnnnnnnnnnnnnnnnnnnnnnnnnnnnnnnnnnnnnnnnnnnnnnnnnnnnnnnnnnnnnnnnnnnnnnnnnnnnnnnnnnnnnnnnnnnnnnnnnnnnnnnnnnnnnnnnnnnnnnnnnnnnnnnnnnnnnnnnnnnnnnnnnnnnnnnnnnnnnnnnnnnnnnnnnnnnnnnnnnnnnnnnnnnnnnnnnnnnnnnnnnnnnnnnnnnnnnnnnnnnnnnnnnnnnnnnnnnnnnnnnnnnnnnnnnnnnnnnnnnnnnnnnnnnnnnnnnnnnnnnnnnnnnnnnnnnnnnnnnnnnnnnnnnnnnnnnnnnnnnnnnnnnnnnnnnnnnnnnnnnnnnnnnnnnnnnnnnnnnnnnnnnnnnnnnnnnnnnnnnnnnnnnnnnnnnnnnnnnnnnnnnnnnnnnnnnnnnnnnnnnnnnnnnnnnnnnnnnnnnnnnnnnnnnnnnnnnnnnnnnnnnnnnnnnnnnnnnnnnnnnnnnnnnnnnnnnnnnnnnnnnnnnnnnnnnnnnnnnnnnnnnnnnnnnnnnnnnnnnnnnnnnnnnnnnnnnnnnnnnnnnnnnnnnnnnnnnnnnnnnnnnnnnnnnnnnnnnnnnnnnnnnnnnnnnnnnnnnnnnnnnnnnnnnnnnnnnnnnnnnnnnnnnnnnnnnnnnnnnnnnnnnnnnnnnnnnnnnnnnnnnnnnnnnnnnnnnnnnnnnnnnnnnnnnnnnnnnnnnnnnnnnnnnnnnnnnnnnnnnnnnnnnnnnnnnnnnnnnnnnnnnnnnnnnnnnnnnnnnnnnnnnnnnnnnnnnnnnnnnnnnnnnnnnnnnnnnnnnnnnnnnnnnnnnnnnnnnnnnnnnnnnnnnnnnnnnnnnnnnnnnnnnnnnnnnnnnnnnnnnnnnnnnnnnnnnnnnnnnnnnnnnnnnnnnnnnnnnnnnnnnnnnnnnnnnnnnnnnnnnnnnnnnnnnnnnnnnnnnnnnnnnnnnnnnnnnnnnnnnnnnnnnnnnnnnnnnnnnnnnnnnnnnnnnnnnnnnnnnnnnnnnnnnnnnnnnnnnnnnnnnnnnnnnnnnnnnnnnnnnnnnnnnnnnnnnnnnnnnnnnnnnnnnnnnnnnnnnnnnnnnnnnnnnnnnnnnnnnnnnnnnnnnnnnnnnnnnnnnnnnnnnnnnnnnnnnnnnnnnnnnnnnnnnnnnnnnnnnnnnnnnnnnnnnnnnnnnnnnnnnnnnnnnnnnnnnnnnnnnnnnnnnnnnnnnnnnnnnnnnnnnnnnnnnnnnnnnnnnnnnnnnnnnnnnnnnnnnnnnnnnnnnnnnnnnnnnnnnnnnnnnnnnnnnnnnnnnnnnnnnnnnnnnnnnnnnnnnnnnnnnnnnnnnnnnnnnnnnnnnnnnnnnnnnnnnnnnnnnnnnnnnnnnnnnnnnnnnnnnnnnnnnnnnnnnnnnnnnnnnnnnnnnnnnnnnnnnnnnnnnnnnnnnnnnnnnnnnnnnnnnnnnnnnnnnnnnnnnnnnnnnnnnnnnnnnnnnnnnnnnnnnnnnnnnnnnnnnnnnnnnnnnnnnnnnnnnnnnnnnnnnnnnnnnnnnnnnnnnnnnnnnnnnnnnnnnnnnnnnnnnnnnnnnnnnnnnnnnnnnnnnnnnnnnnnnnnnnnnnnnnnnnnnnnnnnnnnnnnnnnnnnnnnnnnnnnnnnnnnnnnnnnnnnnnnnnnnnnnnnnnnnnnnnnnnnnnnnnnnnnnnnnnnnnnnnnnnnnnnnnnnnnnnnnnnnnnnnnnnnnnnnnnnnnnnnnnnnnnnnnnnnnnnnnnnnnnnnnnnnnnnnnnnnnnnnnnnnnnnnnnnnnnnnnnnnnnnnnnnnnnnnnnnnnnnnnnnnnnnnnnnnnnnnnnnnnnnnnnnnnnnnnnnnnnnnnnnnnnnnnnnnnnnnnnnnnnnnnnnnnnnnnnnnnnnnnnnnnnnnnnnnnnnnnnnnnnnnnnnnnnnnnnnnnnnnnnnnnnnnnnnnnnnnnnnnnnnnnnnnnnnnnnnnnnnnnnnnnnnnnnnnnnnnnnnnnnnnnnnnnnnnnnnnnnnnnnnnnnnnnnnnnnnnnnnnnnnnnnnnnnnnnnnnnnnnnnnnnnnnnnnnnnnnnnnnnnnnnnnnnnnnnnnnnnnnnnnnnnnnnnnnnnnnnnnnnnnnnnnnnnnnnnnnnnnnnnnnnnnnnnnnnnnnnnnnnnnnnnnnnnnnnnnnnnnnnnnnnnnnnnnnnnnnnnnnnnnnnnnnnnnnnnnnnnnnnnnnnnnnnnnnnnnnnnnnnnnnnnnnnnnnnnnnnnnnnnnnnnnnnnnnnnnnnnnnnnnnnnnnnnnnnnnnnnnnnnnnnnnnnnnnnnnnnnnnnnnnnnnnnnnnnnnnnnnnnnnnnnnnnnnnnnnnnnnnnnnnnnnnnnnnnnnnnnnnnnnnnnnnnnnnnnnnnnnnnnnnnnnnnnnnnnnnnnnnnnnnnnnnnnnnnnnnnnnnnnnnnnnnnnnnnnnnnnnnnnnnnnnnnnnnnnnnnnnnnnnnnnnnnnnnnnnnnnnnnnnnnnnnnnnnnnnnnnnnnnnnnnnnnnnnnnnnnnnnnnnnnnnnnnnnnnnnnnnnnnnnnnnnnnnnnnnnnnnnnnnnnnnnnnnnnnnnnnnnnnnnnnnnnnnnnnnnnnnnnnnnnnnnnnnnnnnnnnnnnnnnnnnnnnnnnnnnnnnnnnnnnnnnnnnnnnnnnnnnnnnnnnnnnnnnnnnnnnnnnnnnnnnnnnnnnnnnnnnnnnnnnnnnnnnnnnnnnnnnnnnnnnnnnnnnnnnnnnnnnnnnnnnnnnnnnnnnnnnnnnnnnnnnnnnnnnnnnnnnnnnnnnnnnnnnnnnnnnnnnnnnnnnnnnnnnnnnnnnnnnnnnnnnnnnnnnnnnnnnnnnnnnnnnnnnnnnnnnnnnnnnnnnnnnnnnnnnnnnnnnnnnnnnnnnnnnnnnnnnnnnnnnnnnnnnnnnnnnnnnnnnnnnnnnnnnnnnnnnnnnnnnnnnnnnnnnnnnnnnnnnnnnnnnnnnnnnnnnnnnnnnnnnnnnnnnnnnnnnnnnnnnnnnnnnnnnnnnnnnnnnnnnnnnnnnnnnnnnnnnnnnnnnnnnnnnnnnnnnnnnnnnnnnnnnnnnnnnnnnnnnnnnnnnnnnnnnnnnnnnnnnnnnnnnnnnnnnnnnnnnnnnnnnnnnnnnnnnnnnnnnnnnnnnnnnnnnnnnnnnnnnnnnnnnnnnnnnnnnnnnnnnnnnnnnnnnnnnnnnnnnnnnnnnnnnnnnnnnnnnnnnnnnnnnnnnnnnnnnnnnnnnnnnnnnnnnnnnnnnnnnnnnnnnnnnnnnnnnnnnnnnnnnnnnnnnnnnnnnnnnnnnnnnnnnnnnnnnnnnnnnnnnnnnnnnnnnnnnnnnnnnnnnnnnnnnnnnnnnnnnnnnnnnnnnnnnnnnnnnnnnnnnnnnnnnnnnnnnnnnnnnnnnnnnnnnnnnnnnnnnnnnnnnnnnnnnnnnnnnnnnnnnnnnnnnnnnnnnnnnnnnnnnnnnnnnnnnnnnnnnnnnnnnnnnnnnnnnnnnnnnnnnnnnnnnnnnnnnnnnnnnnnnnnnnnnnnnnnnnnnnnnnnnnnnnnnnnnnnnnnnnnnnnnnnnnnnnnnnnnnnnnnnnnnnnnnnnnnnnnnnnnnnnnnnnnnnnnnnnnnnnnnnnnnnnnnnnnnnnnnnnnnnnnnnnnnnnnnnnnnnnnnnnnnnnnnnnnnnnnnnnnnnnnnnnnnnnnnnnnnnnnnnnnnnnnnnnnnnnnnnnnnnnnnnnnnnnnnnnnnnnnnnnnnnnnnnnnnnnnnnnnnnnnnnnnnnnnnnnnnnnnnnnnnnnnnnnnnnnnnnnnnnnnnnnnnnnnnnnnnnnnnnnnnnnnnnnnnnnnnnnnnnnnnnnnnnnnnnnnnnnnnnnnnnnnnnnnnnnnnnnnnnnnnnnnnnnnnnnnnnnnnnnnnnnnnnnnnnnnnnnnnnnnnnnnnnnnnnnnnnnnnnnnnnnnnnnnnnnnnnnnnnnnnnnnnnnnnnnnnnnnnnnnnnnnnnnnnnnnnnnnnnnnnnnnnnnnnnnnnnnnnnnnnnnnnnnnnnnnnnnnnnnnnnnnnnnnnnnnnnnnnnnnnnnnnnnnnnnnnnnnnnnnnnnnnnnnnnnnnnnnnnnnnnnnnnnnnnnnnnnnnnnnnnnnnnnnnnnnnnnnnnnnnnnnnnnnnnnnnnnnnnnnnnnnnnnnnnnnnnnnnnnnnnnnnnnnnnnnnnnnnnnnnnnnnnnnnnnnnnnnnnnnnnnnnnnnnnnnnnnnnnnnnnnnnnnnnnnnnnnnnnnnnnnnnnnnnnnnnnnnnnnnnnnnnnnnnnnnnnnnnnnnnnnnnnnnnnnnnnnnnnnnnnnnnnnnnnnnnnnnnnnnnnnnnnnnnnnnnnnnnnnnnnnnnnnnnnnnnnnnnnnnnnnnnnnnnnnnnnnnnnnnnnnnnnnnnnnnnnnnnnnnnnnnnnnnnnnnnnnnnnnnnnnnnnnnnnnnnnnnnnnnnnnnnnnnnnnnnnnnnnnnnnnnnnnnnnnnnnnnnnnnnnnnnnnnnnnnnnnnnnnnnnnnnnnnnnnnnnnnnnnnnnnnnnnnnnnnnnnnnnnnnnnnnnnnnnnnnnnnnnnnnnnnnnnnnnnnnnnnnnnnnnnnnnnnnnnnnnnnnnnnnnnnnnnnnnnnnnnnnnnnnnnnnnnnnnnnnnnnnnnnnnnnnnnnnnnnnnnnnnnnnnnnnnnnnnnnnnnnnnnnnnnnnnnnnnnnnnnnnnnnnnnnnnnnnnnnnnnnnnnnnnnnnnnnnnnnnnnnnnnnnnnnnnnnnnnnnnnnnnnnnnnnnnnnnnnnnnnnnnnnnnnnnnnnnnnnnnnnnnnnnnnnnnnnnnnnnnnnnnnnnnnnnnnnnnnnnnnnnnnnnnnnnnnnnnnnnnnnnnnnnnnnnnnnnnnnnnnnnnnnnnnnnnnnnnnnnnnnnnnnnnnnnnnnnnnnnnnnnnnnnnnnnnnnnnnnnnnnnnnnnnnnnnnnnnnnnnnnnnnnnnnnnnnnnnnnnnnnnnnnnnnnnnnnnnnnnnnnnnnnnnnnnnnnnnnnnnnnnnnnnnnnnnnnnnnnnnnnnnnnnnnnnnnnnnnnnnnnnnnnnnnnnnnnnnnnnnnnnnnnnnnnnnnnnnnnnnnnnnnnnnnnnnnnnnnnnnnnnnnnnnnnnnnnnnnnnnnnnnnnnnnnnnnnnnnnnnnnnnnnnnnnnnnnnnnnnnnnnnnnnnnnnnnnnnnnnnnnnnnnnnnnnnnnnnnnnnnnnnnnnnnnnnnnnnnnnnnnnnnnnnnnnnnnnnnnnnnnnnnnnnnnnnnnnnnnnnnnnnnnnnnnnnnnnnnnnnnnnnnnnnnnnnnnnnnnnnnnnnnnnnnnnnnnnnnnnnnnnnnnnnnnnnnnnnnnnnnnnnnnnnnnnnnnnnnnnnnnnnnnnnnnnnnnnnnnnnnnnnnnnnnnnnnnnnnnnnnnnnnnnnnnnnnnnnnnnnnnnnnnnnnnnnnnnnnnnnnnnnnnnnnnnnnnnnnnnnnnnnnnnnnnnnnnnnnnnnnnnnnnnnnnnnnnnnnnnnnnnnnnnnnnnnnnnnnnnnnnnnnnnnnnnnnnnnnnnnnnnnnnnnnnnnnnnnnnnnnnnnnnnnnnnnnnnnnnnnnnnnnnnnnnnnnnnnnnnnnnnnnnnnnnnnnnnnnnnnnnnnnnnnnnnnnnnnnnnnnnnnnnnnnnnnnnnnnnnnnnnnnnnnnnnnnnnnnnnnnnnnnnnnnnnnnnnnnnnnnnnnnnnnnnnnnnnnnnnnnnnnnnnnnnnnnnnnnnnnnnnnnnnnnnnnnnnnnnnnnnnnnnnnnnnnnnnnnnnnnnnnnnnnnnnnnnnnnnnnnnnnnnnnnnnnnnnnnnnnnnnnnnnnnnnnnnnnnnnnnnnnnnnnnnnnnnnnnnnnnnnnnnnnnnnnnnnnnnnnnnnnnnnnnnnnnnnnnnnnnnnnnnnnnnnnnnnnnnnnnnnnnnnnnnnnnnnnnnnnnnnnnnnnnnnnnnnnnnnnnnnnnnnnnnnnnnnnnnnnnnnnnnnnnnnnnnnnnnnnnnnnnnnnnnnnnnnnnnnnnnnnnnnnnnnnnnnnnnnnnnnnnnnnnnnnnnnnnnnnnnnnnnnnnnnnnnnnnnnnnnnnnnnnnnnnnnnnnnnnnnnnnnnnnnnnnnnnnnnnnnnnnnnnnnnnnnnnnnnnnnnnnnnnnnnnnnnnnnnnnnnnnnnnnnnnnnnnnnnnnnnnnnnnnnnnnnnnnnnnnnnnnnnnnnnnnnnnnnnnnnnnnnnnnnnnnnnnnnnnnnnnnnnnnnnnnnnnnnnnnnnnnnnnnnnnnnnnnnnnnnnnnnnnnnnnnnnnnnnnnnnnnnnnnnnnnnnnnnnnnnnnnnnnnnnnnnnnnnnnnnnnnnnnnnnnnnnnnnnnnnnnnnnnnnnnnnnnnnnnnnnnnnnnnnnnnnnnnnnnnnnnnnnnnnnnnnnnnnnnnnnnnnnnnnnnnnnnnnnnnnnnnnnnnnnnnnnnnnnnnnnnnnnnnnnnnnnnnnnnnnnnnnnnnnnnnnnnnnnnnnnnnnnnnnnnnnnnnnnnnnnnnnnnnnnnnnnnnnnnnnnnnnnnnnnnnnnnnnnnnnnnnnnnnnnnnnnnnnnnnnnnnnnnnnnnnnnnnnnnnnnnnnnnnnnnnnnnnnnnnnnnnnnnnnnnnnnnnnnnnnnnnnnnnnnnnnnnnnnnnnnnnnnnnnnnnnnnnnnnnnnnnnnnnnnnnnnnnnnnnnnnnnnnnnnnnnnnnnnnnnnnnnnnnnnnnnnnnnnnnnnnnnnnnnnnnnnnnnnnnnnnnnnnnnnnnnnnnnnnnnnnnnnnnnnnnnnnnnnnnnnnnnnnnnnnnnnnnnnnnnnnnnnnnnnnnnnnnnnnnnnnnnnnnnnnnnnnnnnnnnnnnnnnnnnnnnnnnnnnnnnnnnnnnnnnnnnnnnnnnnnnnnnnnnnnnnnnnnnnnnnnnnnnnnnnnnnnnnnnnnnnnnnnnnnnnnnnnnnnnnnnnnnnnnnnnnnnnnnnnnnnnnnnnnnnnnnnnnnnnnnnnnnnnnnnnnnnnnnnnnnnnnnnnnnnnnnnnnnnnnnnnnnnnnnnnnnnnnnnnnnnnnnnnnnnnnnnnnnnnnnnnnnnnnnnnnnnnnnnnnnnnnnnnnnnnnnnnnnnnnnnnnnnnnnnnnnnnnnnnnnnnnnnnnnnnnnnnnnnnnnnnnnnnnnnnnnnnnnnnnnnnnnnnnnnnnnnnnnnnnnnnnnnnnnnnnnnnnnnnnnnnnnnnnnnnnnnnnnnnnnnnnnnnnnnnnnnnnnnnnnnnnnnnnnnnnnnnnnnnnnnnnnnnnnnnnnnnnnnnnnnnnnnnnnnnnnnnnnnnnnnnnnnnnnnnnnnnnnnnnnnnnnnnnnnnnnnnnnnnnnnnnnnnnnnnnnnnnnnnnnnnnnnnnnnnnnnnnnnnnnnnnnnnnnnnnnnnnnnnnnnnnnnnnnnnnnnnnnnnnnnnnnnnnnnnnnnnnnnnnnnnnnnnnnnnnnnnnnnnnnnnnnnnnnnnnnnnnnnnnnnnnnnnnnnnnnnnnnnnnnnnnnnnnnnnnnnnnnnnnnnnnnnnnnnnnnnnnnnnnnnnnnnnnnnnnnnnnnnnnnnnnnnnnnnnnnnnnnnnnnnnnnnnnnnnnnnnnnnnnnnnnnnnnnnnnnnnnnnnnnnnnnnnnnnnnnnnnnnnnnnnnnnnnnnnnnnnnnnnnnnnnnnnnnnnnnnnnnnnnnnnnnnnnnnnnnnnnnnnnnnnnnnnnnnnnnnnnnnnnnnnnnnnnnnnnnnnnnnnnnnnnnnnnnnnnnnnnnnnnnnnnnnnnnnnnnnnnnnnnnnnnnnnnnnnnnnnnnnnnnnnnnnnnnnnnnnnnnnnnnnnnnnnnnnnnnnnnnnnnnnnnnnnnnnnnnnnnnnnnnnnnnnnnnnnnnnnnnnnnnnnnnnnnnnnnnnnnnnnnnnnnnnnnnnnnnnnnnnnnnnnnnnnnnnnnnnnnnnnnnnnnnnnnnnnnnnnnnnnnnnnnnnnnnnnnnnnnnnnnnnnnnnnnnnnnnnnnnnnnnnnnnnnnnnnnnnnnnnnnnnnnnnnnnnnnnnnnnnnnnnnnnnnnnnnnnnnnnnnnnnnnnnnnnnnnnnnnnnnnnnnnnnnnnnnnnnnnnnnnnnnnnnnnnnnnnnnnnnnnnnnnnnnnnnnnnnnnnnnnnnnnnnnnnnnnnnnnnnnnnnnnnnnnnnnnnnnnnnnnnnnnnnnnnnnnnnnnnnnnnnnnnnnnnnnnnnnnnnnnnnnnnnnnnnnnnnnnnnnnnnnnnnnnnnnnnnnnnnnnnnnnnnnnnnnnnnnnnnnnnnnnnnnnnnnnnnnnnnnnnnnnnnnnnnnnnnnnnnnnnnnnnnnnnnnnnnnnnnnnnnnnnnnnnnnnnnnnnnnnnnnnnnnnnnnnnnnnnnnnnnnnnnnnnnnnnnnnnnnnnnnnnnnnnnnnnnnnnnnnnnnnnnnnnnnnnnnnnnnnnnnnnnnnnnnnnnnnnnnnnnnnnnnnnnnnnnnnnnnnnnnnnnnnnnnnnnnnnnnnnnnnnnnnnnnnnnnnnnnnnnnnnnnnnnnnnnnnnnnnnnnnnnnnnnnnnnnnnnnnnnnnnnnnnnnnnnnnnnnnnnnnnnnnnnnnnnnnnnnnnnnnnnnnnnnnnnnnnnnnnnnnnnnnnnnnnnnnnnnnnnnnnnnnnnnnnnnnnnnnnnnnnnnnnnnnnnnnnnnnnnnnnnnnnnnnnnnnnnnnnnnnnnnnnnnnnnnnnnnnnnnnnnnnnnnnnnnnnnnnnnnnnnnnnnnnnnnnnnnnnnnnnnnnnnnnnnnnnnnnnnnnnnnnnnnnnnnnnnnnnnnnnnnnnnnnnnnnnnnnnnnnnnnnnnnnnnnnnnnnnnnnnnnnnnnnnnnnnnnnnnnnnnnnnnnnnnnnnnnnnnnnnnnnnnnnnnnnnnnnnnnnnnnnnnnnnnnnnnnnnnnnnnnnnnnnnnnnnnnnnnnnnnnnnnnnnnnnnnnnnnnnnnnnnnnnnnnnnnnnnnnnnnnnnnnnnnnnnnnnnnnnnnnnnnnnnnnnnnnnnnnnnnnnnnnnnnnnnnnnnnnnnnnnnnnnnnnnnnnnnnnnnnnnnnnnnnnnnnnnnnnnnnnnnnnnnnnnnnnnnnnnnnnnnnnnnnnnnnnnnnnnnnnnnnnnnnnnnnnnnnnnnnnnnnnnnnnnnnnnnnnnnnnnnnnnnnnnnnnnnnnnnnnnnnnnnnnnnnnnnnnnnnnnnnnnnnnnnnnnnnnnnnnnnnnnnnnnnnnnnnnnnnnnnnnnnnnnnnnnnnnnnnnnnnnnnnnnnnnnnnnnnnnnnnnnnnnnnnnnnnnnnnnnnnnnnnnnnnnnnnnnnnnnnnnnnnnnnnnnnnnnnnnnnnnnnnnnnnnnnnnnnnnnnnnnnnnnnnnnnnnnnnnnnnnnnnnnnnnnnnnnnnnnnnnnnnnnnnnnnnnnnnnnnnnnnnnnnnnnnnnnnnnnnnnnnnnnnnnnnnnnnnnnnnnnnnnnnnnnnnnnnnnnnnnnnnnnnnnnnnnnnnnnnnnnnnnnnnnnnnnnnnnnnnnnnnnnnnnnnnnnnnnnnnnnnnnnnnnnnnnnnnnnnnnnnnnnnnnnnnnnnnnnnnnnnnnnnnnnnnnnnnnnnnnnnnnnnnnnnnnnnnnnnnnnnnnnnnnnnnnnnnnnnnnnnnnnnnnnnnnnnnnnnnnnnnnnnnnnnnnnnnnnnnnnnnnnnnnnnnnnnnnnnnnnnnnnnnnnnnnnnnnnnnnnnnnnnnnnnnnnnnnnnnnnnnnnnnnnnnnnnnnnnnnnnnnnnnnnnnnnnnnnnnnnnnnnnnnnnnnnnnnnnnnnnnnnnnnnnnnnnnnnnnnnnnnnnnnnnnnnnnnnnnnnnnnnnnnnnnnnnnnnnnnnnnnnnnnnnnnnnnnnnnnnnnnnnnnnnnnnnnnnnnnnnnnnnnnnnnnnnnnnnnnnnnnnnnnnnnnnnnnnnnnnnnnnnnnnnnnnnnnnnnnnnnnnnnnnnnnnnnnnnnnnnnnnnnnnnnnnnnnnnnnnnnnnnnnnnnnnnnnnnnnnnnnnnnnnnnnnnnnnnnnnnnnnnnnnnnnnnnnnnnnnnnnnnnnnnnnnnnnnnnnnnnnnnnnnnnnnnnnnnnnnnnnnnnnnnnnnnnnnnnnnnnnnnnnnnnnnnnnnnnnnnnnnnnnnnnnnnnnnnnnnnnnnnnnnnnnnnnnnnnnnnnnnnnnnnnnnnnnnnnnnnnnnnnnnnnnnnnnnnnnnnnnnnnnnnnnnnnnnnnnnnnnnnnnnnnnnnnnnnnnnnnnnnnnnnnnnnnnnnnnnnnnnnnnnnnnnnnnnnnnnnnnnnnnnnnnnnnnnnnnnnnnnnnnnnnnnnnnnnnnnnnnnnnnnnnnnnnnnnnnnnnnnnnnnnnnnnnnnnnnnnnnnnnnnnnnnnnnnnnnnnnnnnnnnnnnnnnnnnnnnnnnnnnnnnnnnnnnnnnnnnnnnnnnnnnnnnnnnnnnnnnnnnnnnnnnnnnnnnnnnnnnnnnnnnnnnnnnnnnnnnnnnnnnnnnnnnnnnnnnnnnnnnnnnnnnnnnnnnnnnnnnnnnnnnnnnnnnnnnnnnnnnnnnnnnnnnnnnnnnnnnnnnnnnnnnnnnnnnnnnnnnnnnnnnnnnnnnnnnnnnnnnnnnnnnnnnnnnnnnnnnnnnnnnnnnnnnnnnnnnnnnnnnnnnnnnnnnnnnnnnnnnnnnnnnnnnnnnnnnnnnnnnnnnnnnnnnnnnnnnnnnnnnnnnnnnnnnnnnnnnnnnnnnnnnnnnnnnnnnnnnnnnnnnnnnnnnnnnnnnnnnnnnnnnnnnnnnnnnnnnnnnnnnnnnnnnnnnnnnnnnnnnnnnnnnnnnnnnnnnnnnnnnnnnnnnnnnnnnnnnnnnnnnnnnnnnnnnnnnnnnnnnnnnnnnnnnnnnnnnnnnnnnnnnnnnnnnnnnnnnnnnnnnnnnnnnnnnnnnnnnnnnnnnnnnnnnnnnnnnnnnnnnnnnnnnnnnnnnnnnnnnnnnnnnnnnnnnnnnnnnnnnnnnnnnnnnnnnnnnnnnnnnnnnnnnnnnnnnnnnnnnnnnnnnnnnnnnnnnnnnnnnnnnnnnnnnnnnnnnnnnnnnnnnnnnnnnnnnnnnnnnnnnnnnnnnnnnnnnnnnnnnnnnnnnnnnnnnnnnnnnnnnnnnnnnnnnnnnnnnnnnnnnnnnnnnnnnnnnnnnnnnnnnnnnnnnnnnnnnnnnnnnnnnnnnnnnnnnnnnnnnnnnnnnnnnnnnnnnnnnnnnnnnnnnnnnnnnnnnnnnnnnnnnnnnnnnnnnnnnnnnnnnnnnnnnnnnnnnnnnnnnnnnnnnnnnnnnnnnnnnnnnnnnnnnnnnnnnnnnnnnnnnnnnnnnnnnnnnnnnnnnnnnnnnnnnnnnnnnnnnnnnnnnnnnnnnnnnnnnnnnnnnnnnnnnnnnnnnnnnnnnnnnnnnnnnnnnnnnnnnnnnnnnnnnnnnnnnnnnnnnnnnnnnnnnnnnnnnnnnnnnnnnnnnnnnnnnnnnnnnnnnnnnnnnnnnnnnnnnnnnnnnnnnnnnnnnnnnnnnnnnnnnnnnnnnnnnnnnnnnnnnnnnnnnnnnnnnnnnnnnnnnnnnnnnnnnnnnnnnnnnnnnnnnnnnnnnnnnnnnnnnnnnnnnnnnnnnnnnnnnnnnnnnnnnnnnnnnnnnnnnnnnnnnnnnnnnnnnnnnnnnnnnnnnnnnnnnnnnnnnnnnnnnnnnnnnnnnnnnnnnnnnnnnnnnnnnnnnnnnnnnnnnnnnnnnnnnnnnnnnnnnnnnnnnnnnnnnnnnnnnnnnnnnnnnnnnnnnnnnnnnnnnnnnnnnnnnnnnnnnnnnnnnnnnnnnnnnnnnnnnnnnnnnnnnnnnnnnnnnnnnnnnnnnnnnnnnnnnnnnnnnnnnnnnnnnnnnnnnnnnnnnnnnnnnnnnnnnnnnnnnnnnnnnnnnnnnnnnnnnnnnnnnnnnnnnnnnnnnnnnnnnnnnnnnnnnnnnnnnnnnnnnnnnnnnnnnnnnnnnnnnnnnnnnnnnnnnnnnnnnnnnnnnnnnnnnnnnnnnnnnnnnnnnnnnnnnnnnnnnnnnnnnnnnnnnnnnnnnnnnnnnnnnnnnnnnnnnnnnnnnnnnnnnnnnnnnnnnnnnnnnnnnnnnnnnnnnnnnnnnnnnnnnnnnnnnnnnnnnnnnnnnnnnnnnnnnnnnnnnnnnnnnnnnnnnnnnnnnnnnnnnnnnnnnnnnnnnnnnnnnnnnnnnnnnnnnnnnnnnnnnnnnnnnnnnnnnnnnnnnnnnnnnnnnnnnnnnnnnnnnnnnnnnnnnnnnnnnnnnnnnnnnnnnnnnnnnnnnnnnnnnnnnnnnnnnnnnnnnnnnnnnnnnnnnnnnnnnnnnnnnnnnnnnnnnnnnnnnnnnnnnnnnnnnnnnnnnnnnnnnnnnnnnnnnnnnnnnnnnnnnnnnnnnnnnnnnnnnnnnnnnnnnnnnnnnnnnnnnnnnnnnnnnnnnnnnnnnnnnnnnnnnnnnnnnnnnnnnnnnnnnnnnnnnnnnnnnnnnnnnnnnnnnnnnnnnnnnnnnnnnnnnnnnnnnnnnnnnnnnnnnnnnnnnnnnnnnnnnnnnnnnnnnnnnnnnnnnnnnnnnnnnnnnnnnnnnnnnnnnnnnnnnnnnnnnnnnnnnnnnnnnnnnnnnnnnnnnnnnnnnnnnnnnnnnnnnnnnnnnnnnnnnnnnnnnnnnnnnnnnnnnnnnnnnnnnnnnnnnnnnnnnnnnnnnnnnnnnnnnnnnnnnnnnnnnnnnnnnnnnnnnnnnnnnnnnnnnnnnnnnnnnnnnnnnnnnnnnnnnnnnnnnnnnnnnnnnnnnnnnnnnnnnnnnnnnnnnnnnnnnnnnnnnnnnnnnnnnnnnnnnnnnnnnnnnnnnnnnnnnnnnnnnnnnnnnnnnnnnnnnnnnnnnnnnnnnnnnnnnnnnnnnnnnnnnnnnnnnnnnnnnnnnnnnnnnnnnnnnnnnnnnnnnnnnnnnnnnnnnnnnnnnnnnnnnnnnnnnnnnnnnnnnnnnnnnnnnnnnnnnnnnnnnnnnnnnnnnnnnnnnnnnnnnnnnnnnnnnnnnnnnnnnnnnnnnnnnnnnnnnnnnnnnnnnnnnnnnnnnnnnnnnnnnnnnnnnnnnnnnnnnnnnnnnnnnnnnnnnnnnnnnnnnnnnnnnnnnnnnnnnnnnnnnnnnnnnnnnnnnnnnnnnnnnnnnnnnnnnnnnnnnnnnnnnnnnnnnnnnnnnnnnnnnnnnnnnnnnnnnnnnnnnnnnnnnnnnnnnnnnnnnnnnnnnnnnnnnnnnnnnnnnnnnnnnnnnnnnnnnnnnnnnnnnnnnnnnnnnnnnnnnnnnnnnnnnnnnnnnnnnnnnnnnnnnnnnnnnnnnnnnnnnnnnnnnnnnnnnnnnnnnnnnnnnnnnnnnnnnnnnnnnnnnnnnnnnnnnnnnnnnnnnnnnnnnnnnnnnnnnnnnnnnnnnnnnnnnnnnnnnnnnnnnnnnnnnnnnnnnnnnnnnnnnnnnnnnnnnnnnnnnnnnnnnnnnnnnnnnnnnnnnnnnnnnnnnnnnnnnnnnnnnnnnnnnnnnnnnnnnnnnnnnnnnnnnnnnnnnnnnnnnnnnnnnnnnnnnnnnnnnnnnnnnnnnnnnnnnnnnnnnnnnnnnnnnnnnnnnnnnnnnnnnnnnnnnnnnnnnnnnnnnnnnnnnnnnnnnnnnnnnnnnnnnnnnnnnnnnnnnnnnnnnnnnnnnnnnnnnnnnnnnnnnnnnnnnnnnnnnnnnnnnnnnnnnnnnnnnnnnnnnnnnnnnnnnnnnnnnnnnnnnnnnnnnnnnnnnnnnnnnnnnnnnnnnnnnnnnnnnnnnnnnnnnnnnnnnnnnnnnnnnnnnnnnnnnnnnnnnnnnnnnnnnnnnnnnnnnnnnnnnnnnnnnnnnnnnnnnnnnnnnnnnnnnnnnnnnnnnnnnnnnnnnnnnnnnnnnnnnnnnnnnnnnnnnnnnnnnnnnnnnnnnnnnnnnnnnnnnnnnnnnnnnnnnnnnnnnnnnnnnnnnnnnnnnnnnnnnnnnnnnnnnnnnnnnnnnnnnnnnnnnnnnnnnnnnnnnnnnnnnnnnnnnnnnnnnnnnnnnnnnnnnnnnnnnnnnnnnnnnnnnnnnnnnnnnnnnnnnnnnnnnnnnnnnnnnnnnnnnnnnnnnnnnnnnnnnnnnnnnnnnnnnnnnnnnnnnnnnnnnnnnnnnnnnnnnnnnnnnnnnnnnnnnnnnnnnnnnnnnnnnnnnnnnnnnnnnnnnnnnnnnnnnnnnnnnnnnnnnnnnnnnnnnnnnnnnnnnnnnnnnnnnnnnnnnnnnnnnnnnnnnnnnnnnnnnnnnnnnnnnnnnnnnnnnnnnnnnnnnnnnnnnnnnnnnnnnnnnnnnnnnnnnnnnnnnnnnnnnnnnnnnnnnnnnnnnnnnnnnnnnnnnnnnnnnnnnnnnnnnnnnnnnnnnnnnnnnnnnnnnnnnnnnnnnnnnnnnnnnnnnnnnnnnnnnnnnnnnnnnnnnnnnnnnnnnnnnnnnnnnnnnnnnnnnnnnnnnnnnnnnnnnnnnnnnnnnnnnnnnnnnnnnnnnnnnnnnnnnnnnnnnnnnnnnnnnnnnnnnnnnnnnnnnnnnnnnnnnnnnnnnnnnnnnnnnnnnnnnnnnnnnnnnnnnnnnnnnnnnnnnnnnnnnnnnnnnnnnnnnnnnnnnnnnnnnnnnnnnnnnnnnnnnnnnnnnnnnnnnnnnnnnnnnnnnnnnnnnnnnnnnnnnnnnnnnnnnnnnnnnnnnnnnnnnnnnnnnnnnnnnnnnnnnnnnnnnnnnnnnnnnnnnnnnnnnnnnnnnnnnnnnnnnnnnnnnnnnnnnnnnnnnnnnnnnnnnnnnnnnnnnnnnnnnnnnnnnnnnnnnnnnnnnnnnnnnnnnnnnnnnnnnnnnnnnnnnnnnnnnnnnnnnnnnnnnnnnnnnnnnnnnnnnnnnnnnnnnnnnnnnnnnnnnnnnnnnnnnnnnnnnnnnnnnnnnnnnnnnnnnnnnnnnnnnnnnnnnnnnnnnnnnnnnnnnnnnnnnnnnnnnnnnnnnnnnnnnnnnnnnnnnnnnnnnnnnnnnnnnnnnnnnnnnnnnnnnnnnnnnnnnnnnnnnnnnnnnnnnnnnnnnnnnnnnnnnnnnnnnnnnnnnnnnnnnnnnnnnnnnnnnnnnnnnnnnnnnnnnnnnnnnnnnnnnnnnnnnnnnnnnnnnnnnnnnnnnnnnnnnnnnnnnnnnnnnnnnnnnnnnnnnnnnnnnnnnnnnnnnnnnnnnnnnnnnnnnnnnnnnnnnnnnnnnnnnnnnnnnnnnnnnnnnnnnnnnnnnnnnnnnnnnnnnnnnnnnnnnnnnnnnnnnnnnnnnnnnnnnnnnnnnnnnnnnnnnnnnnnnnnnnnnnnnnnnnnnnnnnnnnnnnnnnnnnnnnnnnnnnnnnnnnnnnnnnnnnnnnnnnnnnnnnnnnnnnnnnnnnnnnnnnnnnnnnnnnnnnnnnnnnnnnnnnnnnnnnnnnnnnnnnnnnnnnnnnnnnnnnnnnnnnnnnnnnnnnnnnnnnnnnnnnnnnnnnnnnnnnnnnnnnnnnnnnnnnnnnnnnnnnnnnnnnnnnnnnnnnnnnnnnnnnnnnnnnnnnnnnnnnnnnnnnnnnnnnnnnnnnnnnnnnnnnnnnnnnnnnnnnnnnnnnnnnnnnnnnnnnnnnnnnnnnnnnnnnnnnnnnnnnnnnnnnnnnnnnnnnnnnnnnnnnnnnnnnnnnnnnnnnnnnnnnnnnnnnnnnnnnnnnnnnnnnnnnnnnnnnnnnnnnnnnnnnnnnnnnnnnnnnnnnnnnnnnnnnnnnnnnnnnnnnnnnnnnnnnnnnnnnnnnnnnnnnnnnnnnnnnnnnnnnnnnnnnnnnnnnnnnnnnnnnnnnnnnnnnnnnnnnnnnnnnnnnnnnnnnnnnnnnnnnnnnnnnnnnnnnnnnnnnnnnnnnnnnnnnnnnnnnnnnnnnnnnnnnnnnnnnnnnnnnnnnnnnnnnnnnnnnnnnnnnnnnnnnnnnnnnnnnnnnnnnnnnnnnnnnnnnnnnnnnnnnnnnnnnnnnnnnnnnnnnnnnnnnnnnnnnnnnnnnnnnnnnnnnnnnnnnnnnnnnnnnnnnnnnnnnnnnnnnnnnnnnnnnnnnnnnnnnnnnnnnnnnnnnnnnnnnnnnnnnnnnnnnnnnnnnnnnnnnnnnnnnnnnnnnnnnnnnnnnnnnnnnnnnnnnnnnnnnnnnnnnnnnnnnnnnnnnnnnnnnnnnnnnnnnnnnnnnnnnnnnnnnnnnnnnnnnnnnnnnnnnnnnnnnnnnnnnnnnnnnnnnnnnnnnnnnnnnnnnnnnnnnnnnnnnnnnnnnnnnnnnnnnnnnnnnnnnnnnnnnnnnnnnnnnnnnnnnnnnnnnnnnnnnnnnnnnnnnnnnnnnnnnnnnnnnnnnnnnnnnnnnnnnnnnnnnnnnnnnnnnnnnnnnnnnnnnnnnnnnnnnnnnnnnnnnnnnnnnnnnnnnnnnnnnnnnnnnnnnnnnnnnnnnnnnnnnnnnnnnnnnnnnnnnnnnnnnnnnnnnnnnnnnnnnnnnnnnnnnnnnnnnnnnnnnnnnnnnnnnnnnnnnnnnnnnnnnnnnnnnnnnnnnnnnnnnnnnnnnnnnnnnnnnnnnnnnnnnnnnnnnnnnnnnnnnnnnnnnnnnnnnnnnnnnnnnnnnnnnnnnnnnnnnnnnnnnnnnnnnnnnnnnnnnnnnnnnnnnnnnnnnnnnnnnnnnnnnnnnnnnnnnnnnnnnnnnnnnnnnnnnnnnnnnnnnnnnnnnnnnnnnnnnnnnnnnnnnnnnnnnnnnnnnnnnnnnnnnnnnnnnnnnnnnnnnnnnnnnnnnnnnnnnnnnnnnnnnnnnnnnnnnnnnnnnnnnnnnnnnnnnnnnnnnnnnnnnnnnnnnnnnnnnnnnnnnnnnnnnnnnnnnnnnnnnnnnnnnnnnnnnnnnnnnnnnnnnnnnnnnnnnnnnnnnnnnnnnnnnnnnnnnnnnnnnnnnnnnnnnnnnnnnnnnnnnnnnnnnnnnnnnnnnnnnnnnnnnnnnnnnnnnnnnnnnnnnnnnnnnnnnnnnnnnnnnnnnnnnnnnnnnnnnnnnnnnnnnnnnnnnnnnnnnnnnnnnnnnnnnnnnnnnnnnnnnnnnnnnnnnnnnnnnnnnnnnnnnnnnnnnnnnnnnnnnnnnnnnnnnnnnnnnnnnnnnnnnnnnnnnnnnnnnnnnnnnnnnnnnnnnnnnnnnnnnnnnnnnnnnnnnnnnnnnnnnnnnnnnnnnnnnnnnnnnnnnnnnnnnnnnnnnnnnnnnnnnnnnnnnnnnnnnnnnnnnnnnnnnnnnnnnnnnnnnnnnnnnnnnnnnnnnnnnnnnnnnnnnnnnnnnnnnnnnnnnnnnnnnnnnnnnnnnnnnnnnnnnnnnnnnnnnnnnnnnnnnnnnnnnnnnnnnnnnnnnnnnnnnnnnnnnnnnnnnnnnnnnnnnnnnnnnnnnnnnnnnnnnnnnnnnnnnnnnnnnnnnnnnnnnnnnnnnnnnnnnnnnnnnnnnnnnnnnnnnnnnnnnnnnnnnnnnnnnnnnnnnnnnnnnnnnnnnnnnnnnnnnnnnnnnnnnnnnnnnnnnnnnnnnnnnnnnnnnnnnnnnnnnnnnnnnnnnnnnnnnnnnnnnnnnnnnnnnnnnnnnnnnnnnnnnnnnnnnnnnnnnnnnnnnnnnnnnnnnnnnnnnnnnnnnnnnnnnnnnnnnnnnnnnnnnnnnnnnnnnnnnnnnnnnnnnnnnnnnnnnnnnnnnnnnnnnnnnnnnnnnnnnnnnnnnnnnnnnnnnnnnnnnnnnnnnnnnnnnnnnnnnnnnnnnnnnnnnnnnnnnnnnnnnnnnnnnnnnnnnnnnnnnnnnnnnnnnnnnnnnnnnnnnnnnnnnnnnnnnnnnnnnnnnnnnnnnnnnnnnnnnnnnnnnnnnnnnnnnnnnnnnnnnnnnnnnnnnnnnnnnnnnnnnnnnnnnnnnnnnnnnnnnnnnnnnnnnnnnnnnnnnnnnnnnnnnnnnnnnnnnnnnnnnnnnnnnnnnnnnnnnnnnnnnnnnnnnnnnnnnnnnnnnnnnnnnnnnnnnnnnnnnnnnnnnnnnnnnnnnnnnnnnnnnnnnnnnnnnnnnnnnnnnnnnnnnnnnnnnnnnnnnnnnnnnnnnnnnnnnnnnnnnnnnnnnnnnnnnnnnnnnnnnnnnnnnnnnnnnnnnnnnnnnnnnnnnnnnnnnnnnnnnnnnnnnnnnnnnnnnnnnnnnnnnnnnnnnnnnnnnnnnnnnnnnnnnnnnnnnnnnnnnnnnnnnnnnnnnnnnnnnnnnnnnnnnnnnnnnnnnnnnnnnnnnnnnnnnnnnnnnnnnnnnnnnnnnnnnnnnnnnnnnnnnnnnnnnnnnnnnnnnnnnnnnnnnnnnnnnnnnnnnnnnnnnnnnnnnnnnnnnnnnnnnnnnnnnnnnnnnnnnnnnnnnnnnnnnnnnnnnnnnnnnnnnnnnnnnnnnnnnnnnnnnnnnnnnnnnnnnnnnnnnnnnnnnnnnnnnnnnnnnnnnnnnnnnnnnnnnnnnnnnnnnnnnnnnnnnnnnnnnnnnnnnnnnnnnnnnnnnnnnnnnnnnnnnnnnnnnnnnnnnnnnnnnnnnnnnnnnnnnnnnnnnnnnnnnnnnnnnnnnnnnnnnnnnnnnnnnnnnnnnnnnnnnnnnnnnnnnnnnnnnnnnnnnnnnnnnnnnnnnnnnnnnnnnnnnnnnnnnnnnnnnnnnnnnnnnnnnnnnnnnnnnnnnnnnnnnnnnnnnnnnnnnnnnnnnnnnnnnnnnnnnnnnnnnnnnnnnnnnnnnnnnnnnnnnnnnnnnnnnnnnnnnnnnnnnnnnnnnnnnnnnnnnnnnnnnnnnnnnnnnnnnnnnnnnnnnnnnnnnnnnnnnnnnnnnnnnnnnnnnnnnnnnnnnnnnnnnnnnnnnnnnnnnnnnnnnnnnnnnnnnnnnnnnnnnnnnnnnnnnnnnnnnnnnnnnnnnnnnnnnnnnnnnnnnnnnnnnnnnnnnnnnnnnnnnnnnnnnnnnnnnnnnnnnnnnnnnnnnnnnnnnnnnnnnnnnnnnnnnnnnnnnnnnnnnnnnnnnnnnnnnnnnnnnnnnnnnnnnnnnnnnnnnnnnnnnnnnnnnnnnnnnnnnnnnnnnnnnnnnnnnnnnnnnnnnnnnnnnnnnnnnnnnnnnnnnnnnnnnnnnnnnnnnnnnnnnnnnnnnnnnnnnnnnnnnnnnnnnnnnnnnnnnnnnnnnnnnnnnnnnnnnnnnnnnnnnnnnnnnnnnnnnnnnnnnnnnnnnnnnnnnnnnnnnnnnnnnnnnnnnnnnnnnnnnnnnnnnnnnnnnnnnnnnnnnnnnnnnnnnnnnnnnnnnnnnnnnnnnnnnnnnnnnnnnnnnnnnnnnnnnnnnnnnnnnnnnnnnnnnnnnnnnnnnnnnnnnnnnnnnnnnnnnnnnnnnnnnnnnnnnnnnnnnnnnnnnnnnnnnnnnnnnnnnnnnnnnnnnnnnnnnnnnnnnnnnnnnnnnnnnnnnnnnnnnnnnnnnnnnnnnnnnnnnnnnnnnnnnnnnnnnnnnnnnnnnnnnnnnnnnnnnnnnnnnnnnnnnnnnnnnnnnnnnnnnnnnnnnnnnnnnnnnnnnnnnnnnnnnnnnnnnnnnnnnnnnnnnnnnnnnnnnnnnnnnnnnnnnnnnnnnnnnnnnnnnnnnnnnnnnnnnnnnnnnnnnnnnnnnnnnnnnnnnnnnnnnnnnnnnnnnnnnnnnnnnnnnnnnnnnnnnnnnnnnnnnnnnnnnnnnnnnnnnnnnnnnnnnnnnnnnnnnnnnnnnnnnnnnnnnnnnnnnnnnnnnnnnnnnnnnnnnnnnnnnnnnnnnnnnnnnnnnnnnnnnnnnnnnnnnnnnnnnnnnnnnnnnnnnnnnnnnnnnnnnnnnnnnnnnnnnnnnnnnnnnnnnnnnnnnnnnnnnnnnnnnnnnnnnnnnnnnnnnnnnnnnnnnnnnnnnnnnnnnnnnnnnnnnnnnnnnnnnnnnnnnnnnnnnnnnnnnnnnnnnnnnnnnnnnnnnnnnnnnnnnnnnnnnnnnnnnnnnnnnnnnnnnnnnnnnnnnnnnnnnnnnnnnnnnnnnnnnnnnnnnnnnnnnnnnnnnnnnnnnnnnnnnnnnnnnnnnnnnnnnnnnnnnnnnnnnnnnnnnnnnnnnnnnnnnnnnnnnnnnnnnnnnnnnnnnnnnnnnnnnnnnnnnnnnnnnnnnnnnnnnnnnnnnnnnnnnnnnnnnnnnnnnnnnnnnnnnnnnnnnnnnnnnnnnnnnnnnnnnnnnnnnnnnnnnnnnnnnnnnnnnnnnnnnnnnnnnnnnnnnnnnnnnnnnnnnnnnnnnnnnnnnnnnnnnnnnnnnnnnnnnnnnnnnnnnnnnnnnnnnnnnnnnnnnnnnnnnnnnnnnnnnnnnnnnnnnnnnnnnnnnnnnnnnnnnnnnnnnnnnnnnnnnnnnnnnnnnnnnnnnnnnnnnnnnnnnnnnnnnnnnnnnnnnnnnnnnnnnnnnnnnnnnnnnnnnnnnnnnnnnnnnnnnnnnnnnnnnnnnnnnnnnnnnnnnnnnnnnnnnnnnnnnnnnnnnnnnnnnnnnnnnnnnnnnnnnnnnnnnnnnnnnnnnnnnnnnnnnnnnnnnnnnnnnnnnnnnnnnnnnnnnnnnnnnnnnnnnnnnnnnnnnnnnnnnnnnnnnnnnnnnnnnnnnnnnnnnnnnnnnnnnnnnnnnnnnnnnnnnnnnnnnnnnnnnnnnnnnnnnnnnnnnnnnnnnnnnnnnnnnnnnnnnnnnnnnnnnnnnnnnnnnnnnnnnnnnnnnnnnnnnnnnnnnnnnnnnnnnnnnnnnnnnnnnnnnnnnnnnnnnnnnnnnnnnnnnnnnnnnnnnnnnnnnnnnnnnnnnnnnnnnnnnnnnnnnnnnnnnnnnnnnnnnnnnnnnnnnnnnnnnnnnnnnnnnnnnnnnnnnnnnnnnnnnnnnnnnnnnnnnnnnnnnnnnnnnnnnnnnnnnnnnnnnnnnnnnnnnnnnnnnnnnnnnnnnnnnnnnnnnnnnnnnnnnnnnnnnnnnnnnnnnnnnnnnnnnnnnnnnnnnnnnnnnnnnnnnnnnnnnnnnnnnnnnnnnnnnnnnnnnnnnnnnnnnnnnnnnnnnnnnnnnnnnnnnnnnnnnnnnnnnnnnnnnnnnnnnnnnnnnnnnnnnnnnnnnnnnnnnnnnnnnnnnnnnnnnnnnnnnnnnnnnnnnnnnnnnnnnnnnnnnnnnnnnnnnnnnnnnnnnnnnnnnnnnnnnnnnnnnnnnnnnnnnnnnnnnnnnnnnnnnnnnnnnnnnnnnnnnnnnnnnnnnnnnnnnnnnnnnnnnnnnnnnnnnnnnnnnnnnnnnnnnnnnnnnnnnnnnnnnnnnnnnnnnnnnnnnnnnnnnnnnnnnnnnnnnnnnnnnnnnnnnnnnnnnnnnnnnnnnnnnnnnnnnnnnnnnnnnnnnnnnnnnnnnnnnnnnnnnnnnnnnnnnnnnnnnnnnnnnnnnnnnnnnnnnnnnnnnnnnnnnnnnnnnnnnnnnnnnnnnnnnnnnnnnnnnnnnnnnnnnnnnnnnnnnnnnnnnnnnnnnnnnnnnnnnnnnnnnnnnnnnnnnnnnnnnnnnnnnnnnnnnnnnnnnnnnnnnnnnnnnnnnnnnnnnnnnnnnnnnnnnnnnnnnnnnnnnnnnnnnnnnnnnnnnnnnnnnnnnnnnnnnnnnnnnnnnnnnnnnnnnnnnnnnnnnnnnnnnnnnnnnnnnnnnnnnnnnnnnnnnnnnnnnnnnnnnnnnnnnnnnnnnnnnnnnnnnnnnnnnnnnnnnnnnnnnnnnnnnnnnnnnnnnnnnnnnnnnnnnnnnnnnnnnnnnnnnnnnnnnnnnnnnnnnnnnnnnnnnnnnnnnnnnnnnnnnnnnnnnnnnnnnnnnnnnnnnnnnnnnnnnnnnnnnnnnnnnnnnnnnnnnnnnnnnnnnnnnnnnnnnnnnnnnnnnnnnnnnnnnnnnnnnnnnnnnnnnnnnnnnnnnnnnnnnnnnnnnnnnnnnnnnnnnnnnnnnnnnnnnnnnnnnnnnnnnnnnnnnnnnnnnnnnnnnnnnnnnnnnnnnnnnnnnnnnnnnnnnnnnnnnnnnnnnnnnnnnnnnnnnnnnnnnnnnnnnnnnnnnnnnnnnnnnnnnnnnnnnnnnnnnnnnnnnnnnnnnnnnnnnnnnnnnnnnnnnnnnnnnnnnnnnnnnnnnnnnnnnnnnnnnnnnnnnnnnnnnnnnnnnnnnnnnnnnnnnnnnnnnnnnnnnnnnnnnnnnnnnnnnnnnnnnnnnnnnnnnnnnnnnnnnnnnnnnnnnnnnnnnnnnnnnnnnnnnnnnnnnnnnnnnnnnnnnnnnnnnnnnnnnnnnnnnnnnnnnnnnnnnnnnnnnnnnnnnnnnnnnnnnnnnnnnnnnnnnnnnnnnnnnnnnnnnnnnnnnnnnnnnnnnnnnnnnnnnnnnnnnnnnnnnnnnnnnnnnnnnnnnnnnnnnnnnnnnnnnnnnnnnnnnnnnnnnnnnnnnnnnnnnnnnnnnnnnnnnnnnnnnnnnnnnnnnnnnnnnnnnnnnnnnnnnnnnnnnnnnnnnnnnnnnnnnnnnnnnnnnnnnnnnnnnnnnnnnnnnnnnnnnnnnnnnnnnnnnnnnnnnnnnnnnnnnnnnnnnnnnnnnnnnnnnnnnnnnnnnnnnnnnnnnnnnnnnnnnnnnnnnnnnnnnnnnnnnnnnnnnnnnnnnnnnnnnnnnnnnnnnnnnnnnnnnnnnnnnnnnnnnnnnnnnnnnnnnnnnnnnnnnnnnnnnnnnnnnnnnnnnnnnnnnnnnnnnnnnnnnnnnnnnnnnnnnnnnnnnnnnnnnnnnnnnnnnnnnnnnnnnnnnnnnnnnnnnnnnnnnnnnnnnnnnnnnnnnnnnnnnnnnnnnnnnnnnnnnnnnnnnnnnnnnnnnnnnnnnnnnnnnnnnnnnnnnnnnnnnnnnnnnnnnnnnnnnnnnnnnnnnnnnnnnnnnnnnnnnnnnnnnnnnnnnnnnnnnnnnnnnnnnnnnnnnnnnnnnnnnnnnnnnnnnnnnnnnnnnnnnnnnnnnnnnnnnnnnnnnnnnnnnnnnnnnnnnnnnnnnnnnnnnnnnnnnnnnnnnnnnnnnnnnnnnnnnnnnnnnnnnnnnnnnnnnnnnnnnnnnnnnnnnnnnnnnnnnnnnnnnnnnnnnnnnnnnnnnnnnnnnnnnnnnnnnnnnnnnnnnnnnnnnnnnnnnnnnnnnnnnnnnnnnnnnnnnnnnnnnnnnnnnnngatcttgtccacaggtaggtgggtgactctcaaaccaaaattcattacatctgtgagactgtaactctcctaaggggagaagttcttctcagccagagaagactcatttatgaatccagttcactgttgagattgggactgttgtacctaggccaaacatacaaattctcatacctggaatccggacatgtgtggagttgttcatctcatccctgtcgctttctgcaggtgggattgtgacatacatctctgcccagctcctgagtgttttagctctgtttcctgtgtccagctcacagatgggattctgatatatcactgaagccagcacctaaatgatgtgactcttatctcctgccttggtgctgcccacaggggacattgggacatatcacttggccttgcacctaggtaatgtatgttttctgccttgcattagtgctactcacaggggtgttgtgatgtattgctgggtcccacatccatgttatgtgactcttctgcctgtgcccagtccacaatggccattttgacatattgttgcatccaaaacctagatgatttacctctccttcctgagctttgcctaaggggacattgtgaaatatctatgagcccatcacccatgtggcgtgattttcttctcctgcctagtccctgcttaaagaaaggattgtgacatatcactgtgcccagcacctatctcatgttactcttcttttgttttttaggatttgtttggaaggagattgtgatacattggtgggtccaacttctcagtgacattactctgttgactgtgctctgcaagcagaaagcactgtgacacattattgggcccaacaccaaggtgagtctcctgcctgaagcctgcctacagcaatttgtaacatatggcattgggacatatctctgagcccatcaactatttgacaagattctccttttttaacaaaggctttgcccataggagagattgtgacataattctgagccctgaaaataggggatatttcttttgttttctgcttgagccccacattgtgatgtatttctcctcccaacaactgagggaagggaaagtcctgcctgggtcttgcctatggggagccttgtgaaatctttccgtgttcatcaccttaaatatgtgaccctcatcttctgccatggccatgtttacagaagggagagtgggttattcctagacccagcacacaggtcatgtgattctgcatcctggtgtctccagaggggtcattttgacatatctctagactcatcaactagataatgtaatgctcctcttccccctgaaacctatccatagtggagattgtgaaatacagcctggcacagcacctacatgatggtactctcttctcatgcttgggtgctggccacaggggtgattaagacttatagctgggtacagtcttcaggtgatgtaactctcctctatttttgggcccacacacacagggaactaccatatagctctgctcctcagtcttaggtgatgtgactctgctgtctgttacctcctcttagggggaattgtgatatattgctgggcccagaaccgaggtgatgtggccttttctcttgcctgggccctgcatacatggtgtacagtaacatatatctgggttgaacacataggtgatgtgactcttctgcataggtcttgccaacaggggtattatgacatactcttctattcattgcctaggcgatgtgactctccactcttacctgggcccttccaaaagaggggattgtgacatatcactgaccctaacaccaaggtaatgtgactgttctcttttgcctgggtttgcatattttgggtattgtgacatatccctgggcccaacacttagggaataagaggtttattcctctaccttacgtgcagtgaagcttgtgacatatttctgcattcatcaccaagaagatgtgactcttctgcctgcatcctgaccacagagaggattgtgaaatattgctagatccagcatgcaggtgatgtgtctctgctgcctcgttcctaatgtgaggagtggattgcaacataccaatgcctgaacattcaggtaatgtgactgttgactggtccctgtcctcagggaagcgacatatcactgacccagcatccaactgattttactctcctgctctcttcctatatgcaggtgtaattgttacatatatcttggaacacaacacacaggtgcaatgatgacattcatatgtcaaaccagccaatagaagagatactgcttctcctagctacacttagggaaatgaaaaaaaaccctgggtctcctcgctaagatcatccactctctcatatattacagaaagtcctcaggtggtagagagtcttatcacagggcccagcacacaggtgaaatttgttactcctatgcgcaccctgaaccctcctgaccattatgattttcaccctcacatataaacagaacccactggtgaggtcctgaatttcacacatgaatgcagtttatagttggaattgcgaatctcatatgtaaagatctggccagagttggaatgggaacttcgttataaacccagcgcatagaaagctgatgactctcttatctggaccccgccaattgtaaagatgttgactcatatataggcttagggccacaggtttgatcatgggtccataccagcatgaaaatctctgaaagaattgagactgtcatgcatacaacataaagccgtcaggtgcaacacagaaagtcctaatagggctcagcacacagtaatataatgacattgggatgcacacccagccaacattaaagattgtcgttctttcacatgatcatagttcacttttgaggctctgaatcccatacccaaaggcagattgaaaagttgaaaaattgactctcatatttgagagtcacagatgtgttgatgactctcagatcatgagtcagcacacctaggaagctgtgatttcaattaggggacaaagtacgcaagagaaaatggggctgccatgcacaaatttagtccactattgagatagtgacttgtgtacttagatcaaacatacagaaggtgttcactctcatgcataaaaccagaatatgtgcgggattcatcccatatctggactttcctgcaggtgtcattgtgacaagcatacacatttgtccagcacctgagtgattagactcttctgtttaagcccagctcacaaataaaattgggacatatcattggacctagaacataggtgatgtggctctattctcttgacttcgtgctgcccacagggagcattgtaacgtatcactgaacttaacacctaggagattagaggctcctgcctgaactctgtccacagtgagccttgtagcatatttctgcttccaacaccagatgatgtgactctcctttctgcctgcaccttgcccacaggaaagattctgacatatcactgggcccagtaatcagtaatcaggtgatgtttctctcctgctatggccttgcccacagggagtgtggtgacatatcactgagctcaatattcaggtgatttgactctgctgcttgtactctgatttcaggaggggattgtaacatatcccctgtgagcacacaagtgatgggactcccctcctagcctctgacctcagaaaacattgttacatatccctggcccagccttaggtatgtgactctcctacctgttccctgccatcagggaagatattgacagatctcaggccaagcatcccggtgacgtgactctcctgctcactcccttcccacagaagagattgaaacatatatcttggccagctcacaggtgtaataatgactctcatacctcaaacctgccactaagagaaatactgtttttcatagggaggctttggaaaaccggtaggtcttaactcttcgttttgtatgaaggtcttagaggaatacaactctctcatattatataaagctcttaaatggtacaaagagtgttatcacagggatatgttgcataacctatgggaggggcccagttatatgtcacaattaacccagggggcagggcacaggcatgaaaagagagtcacaccacatatgtgctggcctaagtgatacatcatcatccccactgtggacaggtcgcagtaagaacaggagagtcacatcattctaataatggtctcagagatacatcacaatgactcccctgggcagaaacaagggataaggttcacatcacctgtgggctaggcccagagatgtcactcttacttctgtgggcatgtctcaggctggagaggagaatcacattacctaagcactggaccaagaaatacttcacaatctttctcatggcgaaagcccaggtaagagaatagagccatatcaaatagttcatgggctcagagatatgtcacaatgctccctgtgggcagggttcaggtaggacaatcacattaccttggtgcttgttcagcaatatatcccaaagccttctgagggcagagccaagataaaagagtaaaatcattttggtgttttacaaatcgatatgtcacaatctcccccgagggcagaacctgaaaaaagggaagagtcacattagctaaatgctgcgccgggtgataagtcacaattcaccctgtaggcagagactagacagaagatagagtcacatcatctagtggctggtgcagagatatgccaccatgccctctctaggcagagttcagacaggagagttatgtcacctgtgttttggacccagaaatatgtcacaaaagcccatggacagagcacaggaaagacaggcacataacctgaatatcagcttcagtggtatgacccaatgcctcctgtgagcgttccaaggcaggagaggagactcacattacctgtgtgcaaggcccagtgatacgtcacacggaggagtaccactgtcttgcatattgtgtaaactatggtagagaaattgtcaccacagggctcgccacactggtgagattatacttctcagatgcacaccacaccaatattcaggatggtctctatcacacgtggagagagcccactcttgaggtcctgaattacacatgcagacacagtccacaactgggattgtgactttcatatgtgaacatccagccacaggtgggatggtgactcatttttaaacgcagctcataggcagttaagaactcttatttggacccatccaagtagaaagatgttgactgtcataccagggcttaaagctaaaggtacaaggaggggtccgtgcctgcttaaggtttcagagagaattgttacactcatgcatactctataaaggctgcatatggtgaagagagtgtcctgacagggcccagaacaaaagtagattgtgacactcatatctacgctgagccaagagtaaaaattgtcatcttttcacatgaacacagcccattgttgaggttccaaatctcacacctggaggcggttgagagatgaataattgactctcataagtggatgcgatccatgtttgagtcagtgactctaaaaccaacattcagcaaacacgtgaggctgtgactccattaaggggccacggtcctcgggaaagactgaagctgccatgcacagatccagtgcaccattgagactgtgacttctacacttagacccaacaaacacaatgtgtttgctctcacacctagatatgggacatgtgcaggattgtcagtctcagccctggactttcctggaggtataactgtgaaatatatctcggcccagctcgtgagtgacttgactcttctgcgtagcccagcccatgataaaattgtgacattattgaacccagcacctatgacccccctcttctgcctgggtcctgtcaaaaagagagattgtaacaaatcactgggacaagcacccacatgatgtgactctcctcttttccctgggccctgcatattttgtatattgtgacatactgctgggcataatacctagggaattgatggctactgcctgagccctgttcacagggggccttgggacatctctctgcattcaccacctaaaaaaagtgtgtgcaccctgcctacaaagaagattgtagcagatcacttgtcttagcaaccaagtgatgcgagtctcctgtcctgccttggtgctgctcacaggggacattataacatatacttggtgctgcacccatgttttgtaatttttctgccaggggtctaccatataagctatattgctgggtccaacacccaggttatgcagctctcctttctgtgctctgcctacaggggacattgtgacttatctctgcacccatcactcaggtgatgtgacttgcttctgctgactgattcctgttcaagtggagattgtgacatatcaatggtggcaccatctagctgatgtaactattctcttctgcctaggttcttcctgcagtggaaattgtgatgtatcactgggcttaacaccaaagtgacattaattttttgccttggttcttccctcagaagacattgtaatatattgctgggctcagcaccaaaacgatgtggatttcctgtctggaccctgcatacaggagtccctgtgacatatctcttgactcatcaactatttgatgtgactctcctctgttccctgagctttgcctataggaaagcgtcagcctggactccagagtcagccacccacccctgcacagacaaggagaggtctcattaagcttcagcacagtctgggaccatagctttttttgtaacgatttgttcggcatgaggcccactcacaagggcccttcgtgactggactcaaggaaaacgaaaaggcctacttgtttttgcgattttctgttgtttttcaataactatttctcagaaacagtgctggatgaattccacaaggggttcacacaacctgttccaggacttagtgaccattgtttctgtccatgttcattgagttcaaatttaatatttaacttttcctcctcattcagcctcaatttgacactgaatcataggaaaatatttttacagttatacggggaagtcacaactggtatagattacagatagagcagaggagaattaaaagcacaattaatagaaaccacacccaccacggccaacgccaatgctagtttgacagccagtccatgatggggtcctgatggttagattctaactgttttacttgtccttgcatgtcttcggcaaggagagtaatactgcgagaactgtcagggatacacacaacattcagaatgcagcaagactcaaacccctccttgggctgcggtaaacatacctaatgccattcgattttgcaacacaacagtacacagctgaacaagttcttctgataacaacagaagtccagtgctactatcttaggagcttttactatatgtggacttaatattttaatttgttgctgaagcaggattgtacgaggggcaagggagaatactgtgatagttttccaccaccagggagtctggcacgttcataaccagctacctttgtaagcatctagattattggggaagggaatattatcccggatggtgaatggaattaatggcacccccaagtgaatctccccatccaataagggggcagataggccacccatagggtctgcatacccagagggccccccaggggacagcaatggttatactacaattatagtgtattaagatgttattaaagtagcaaaggaagtccaggttggattgcaagtgttgttgttttggccccatttgtagtgacagagccattcagaaatattggcaaggacaactctgcaaggcagtccatttcctgtggcctctggcaatttgatgcatagccagcattgactgcggttagcttctgtcgcagtggttgctgcccagttgatgaattcactctccacctcagacctgatgacccaggtactgattactagtagacaggttattctctgtaacaacaaaactgaaggggaacataatattgtttttcatttttaggaaactgtactacccttttattttctgctcccatacctacaaggtcacagccttaggggcgggatctgatggaggctgtatccatattttcgttccaggatttaagctacctataccagtggatcttaatttcccagttctgtacgtagcctctgttggggcagagatttcctcaggggttaattgttaacaaggtaccaggtaccactgacaattgagcaacccgaatctgcggtcttgtaacaaaagaatgtggagtggtattgtgtaaagtgaactttaactgttcctggtaatcattatcaattataccaccatacattataatgtgtctcatcgccaggcttgaatgtgttgtaatccattcacccacattcaagtttgcatttatgctggaaattttggcctgttgatctacctgctgtttagtctgtcaagagaatgcagagatgcatgagaatcaatatgaaaaacagcaataatagtaatgtgcatcaggattcaggtatcttcctagtattgttttctccaaacctctttattcattattcactatttgtttcattgccattcgggcaactaggtagtaagaccattttctgctgaccaacagtcggtatacaagcaacaaattgctctggcctcctcctgaatagttcggaggatggcttctagttcagccagctggctgctcacacccctcccttcatcagaaacgcttatgtttttaacaggattataagccacggcctcccagcatcaggtcccatcaatgtatttggtggaactatcagtaaccaagcgtgtttctgatcctctgggcttagttctttaaaggatttgccccattgggcaggggaggtttccttccctatatgcaggacttgccctgtggtttcctgagttggcaagttttgcacatcttcaagtaaaaatgataccgcttttagttctggcttatcctggtcttgtatgtaccatttccattttatgatactacattcttgagtgtaccctatccaatgggttttgagggagctcatgacccaagtcataataggaatttggggcctcataaaaacatcatgattaaaacaaaggtgttctgcttccttcaagcgcagtagaaggccaacagctgcttctcaaagagtataagctttgccagcctctggcagcttctgggtctaaaactccaaaggtatcttcttcccatcttgtttctacctaaggctccaattagcatgttgatgtaggacagttacttgcagttctgttgactcatcctataagggccatagatccagggccagttgctcagcttgttttgcttgttgaaaagccaggctgtctttctctctccagtgatattcatagtgttttctagtgactgcatgcagaggttgtaatatgttacccaagtggggaatatgatgtctccagaatccaaacaagccaatacaattttggacctccttttcagtggtagggctgcaaattctagtattttagcgttagcctttggtaaaatggactgtttccctgcagtccataggatgccaaggaactttacactttgtgcaggccattgaattttattagagttaacttcccatccttgagataggatttgggtttttaccctcttctgccctgaaaactgactagttattcagttttaccctgactgggcaactcggacagctgctttttcagcaataggctgatagctttgagcctgatcagtcaagacaggcctggcatggtaccagggtcagtctggaagtcagattaaaattttccttttccagcttacatttctcttgtaacaaccagtccctacattgacactttaacttataagaagtaagcaagcatcatcaatgctgggaaattccctcagcattacaattaccaactgggactccctgctgcacctcacgcacagccagtgattcaaacaaactttatcccacttaaatggcaatgcagatataataagcaaatatataagcaagttgcaatgggacggggagaagggaaaagatatatatatatatttaaactcaccaaactatggaggattcaccacaagactgtgaagcaacagcctgggctccagattggccactcatccgtccacagacaacgtgagatctcatgaagctttggcgcagtctggaaccccagctctttttgtaatgagttatttggcatgaagtccggtcaggaaggctattcacaacggggctcaaggaacacaaaaaggtcaacttgtttttttgattgtctattgtttttcaataactaagatataggaataaattgaaatagagatttatctgaaacagcgctggatgagggcttcaaggggctcacacaacctgttccgggacttggtgaccattgtttgagtccatgtccaatttagttcaaatttaatatttaccttttactccaaaaagtgtcaaaagtaattccttcaaatgcaggaaattatgtagctactcacaaactaaacttctcaaacaaaagtcataaatagagtacagagataaaaaataaaataaaatctaactacatctgtctacaggggattcaatttatttatttatttatttattttagagacatggtattgctttgtttcccaggctggtctcaaacttctgggctcaagttaacctcccacctcaatctcctaaaatgctcggatgacagatatgagccatcttactatatagtaacaaaaacagactaaaagtggcaagatgcatcaaaacaattttatgcaaatcgtaatgaaatgaagacaacgtcacgagcacattatgcaaaatactttttaaataactgtcttagtttataaaataaattataagttaaaactgtcaaagaaaacaaaggacaaaataataaaaaagtttattcactggaaacctaggaaaattatatacatttatataatatacatttatataattgtgtgtatttatctaattatgtatacagacacacatatatatgaacctcacatgaagattttaaaataaatcaataatattttgtcagaacataaacaaaaaactgcaatatactgagaacaatattttaatacaccagttctgtaattaataataaagccagagagaatgttaagaagaaaacagaggacatgaaaatactgtaaaacagttagatgtaacagatgcatagagatcactctacacaacaacaaaactcacagtcttgtcaaaagctcataaaacattgtcctaaaaataaatataaggaaaaaaattttttaacagaattaaaaaaaattgaatgttacagaaaacacttcaaaaaatcaatcaacccaggagccggttttttgaaaagattaacaaaatagatagaccactagtaagacaaataaaggagaaaagagagaagaatcaaagagacgcaataaaaaacgacaaaggggatatcaccacgaaacccacagaaatacaaactaccatcagagaatactataaacacctctacggaaataaagtggaaaacctagaagaaattgataaattcctggaaacatccacacctccaagactaaacgaggaagaagttgaatctctgagtagaccaatagcaggttctgaaattgaggcaataattaatagcttatgaaccaaaaaaagtccatgaccagacgaattcacaacggaattctaccagaggtacaaagaggagctgctaccatcccttctgaaactattcgaatcaagagaaaaagagggaatcttccttaactcattttatgaggtcagcatcatcctgataccaaagcctggcagaagcacaacaaaaaaacaatatccctgatgaacatcaatgcaaacatcctcaataaaatgctgacaaaccaaatccagcagcacatccaaaagcttacccaccacgatcaattcagcttcatccctgggatgcaagcctggttcaacatatgcaaatcaataaacataattcatcacataaacagaaccaatgacaaaaatctcatgactatctcaatagatgcagaaaaggccttcaacaaaactcaacagcctttcatgataaaaactctaaataaactaggtattgatggaacacatctgaaaataataagagctatttatgacaaacccacagccaatatcatgcagaatgggcaaaacctggaagcattccctttgaaaaccagcacaagacaacgatgccctctctcaccactcccactcaacatagtattggaagttctggccagggccatcaggcaagagaaagaaataaaggacattcgattaggaaaaagaggaagccaaattgtctctgtttgcagatgacatgattgtatatttagaaaaccccattgtctcagcccaaaatctccttaaatctgataagcaacttcagcaaagtctcaggatacaaaataatgtgcaaaaatcacaagtatttccatacaccaataacagatgaacagagagccaaattatgagtgaactcccactcaacaattgctacaaagagaataaaatacctaggaatccaacttacaagggatgtgaaggacattttcaaggagaactacaaaccactgctccatgaaataaaagcggacacaaacaaatggaagaacattccatgctcctggaaaggaagaatcaatatcatgaaaatgaccatgctgcccaagataacttacagattcaatgctatccccatcaagctaccactgactttcttcacagaattggaaaaaactactttgaagttcacatggaaccaaaaaacagcctgcataggcaagaaaatcctacacaaaaagagaaaagctgcaggtatcacactacctgacttcaatctatactacaggtctacagtaacaaaaacagcatggtactggtaccaaaacagatatatagagcaatggaaaaaaacagaggcctcagaaataccatcacacatctacaaccattggatcttcgacaaatgtgacaaaaacaaacaatggggaaaggatttcttatttaataaatgttgctgggaaaaatggcgagccatatgcagaaaactgaaactggatttcttccttacaccctatacataaattgactcaagatggattaaagacttaaatgtaagacccaaaaccataaaaacctaagagaaaacctgggcaataccattcaggacataggcatgggcaaagacttcatgactaaaacaccaaaaacaatggcaacaaaagccaaaatagacaaatgaaatctaattaaacttaaaagcttctacacagcaaacgaaactatcattagagtgaacaggcaacctacagaatgggagaaaatttttgcaatctacccatctgacaaaggactcacatccagaatctacaaagaatttaaacaaatttacaagaaaaaaacgagcaatcccatcaaaaagtgggcaaaggatatgaacagacacttctcaaaagaagacatttatgtaaccaacagacatgaaaaattgctcatcatcactggtcatcagagaaatgcaaatgaaaaccacaatgagataccatcttacgctagttagaatggggatcattaaaatgtcaggaaacaacagatgctggagaggacgtggaaaaacaaaaacgcttttacactgtgggttggagtgtaaattagttcaaacactgtggaagacagtgtggtaattcctcaagtatctacaaccagaaataccatttgacccagcaatcccattactgggtatatatccaaaggattatgaatcatgctactataaaaacacatgcacacgtatgtttattgtggcactgttcagaatagcaaagtcttggaaccaacccaaatgtccatcaatgatagactggattaagaaattgtgacacatataccccatggaatactacgcagccttaaaaaaggatgagttcatgtcatttgcagggacatggatgaagctggaaaccatcattctcagcaaactatcacaaggacagaaaaacaaacactgcatgttttcactcataggtaggagttaaacaatgagaacatgtggacacaggacagggaacatcaaacgctagtgcctgtttgggggtggggggctatgaaagggatagcattaggagaacacttaatgtaaatgttgagttgatgggtgcagcaaaccaacataacacatgtatacctgtataacaaacctgtacgttctgcacatgtatcctagaacttaaagtataataaaaactgaaggctacagactataatttctgaccaaaatggattaaaactagaaatcaataaccgaagaaaattcataaaattcacaaatacatgataattaaacaatttattcttcaacatgtttttgttcaagagttaaaaatttaatattttgaacgtgtctataatgcccaaagtgagctgcagatttaatacaatccctatgaaattcttaatattatttttgacagaaacagagaatgtgactccccaaagtatacggaatttcaggggaccacataaaaaaagttggaagcattacaattcctgatttcaagacatgttagaaatctacagtaatcaaaatcttatgttactagcataaagacagacaattagactaataaaaaaatctttgccactgctgcagacagtgcctgcatcatcctgcagactgacaatgatcattttgctgctgatgactttaaagtgtgagacagacctggccatgtgccagtttgtggagtgcgacattactgataacaccagtgtcagtcagcctctgctggagacagagatggaggccctcaaggaagagctgctcttcatgaagaatcatgaggaggaagttaaaggtctataatacctgatttccagctcttggttgaccatggaggtagatgtccccaagtctcaggaccttggcaagatcatgacaggcatctgggcccaatatgacgagatggctgagaacagctgagaggagctggacaagtactggtcccagcagactgaggagagcaccagagtagtcaccatgcagtccgctgagatcggagctgctgagaggatgctcagggggttgagatgtacagtccagtccttggatatcgaactggactcaatgagatatctgaaagtcagcttggagaacagcctaagggaggtagacgcagatggagcagctcaacaggatcctgctgcacctggagtcagagctatcccaaaaccgggaagagaggtaccacgcccaagagcacgaggacctgtggaacatcaaggtcgagctggaggctgagattgccacttactgccgcctgctagaagacggggaggatttcaatctcctggatgctctggacagcagtaaatacctgcaagctatccaaaagaacagcccccgcaggatagtggacgggaaagtggtgtctgagaccaacaatacagactttttgttgtgctaagccatcagaagcaaggtccctttggggagcaggaggccagtaaaaagttcagaggtaaaaaaaaattaacttcaaatcacagaagtgtttccttcaacacaaaagtaatatagattcattaatatatagaagtggaaattaagacaatttccacaactactcacccagagaggattaaaaaaataattgaccaccaactaattaaacaaatacacaagtcataaataaagtatgagtaatgtttatacaagcaaatgaacagagaattatgttggcaatagacgtgtggttgattcatatttgactgattcatattcaactgtacacagttgaatatagtcatacaaaattataatatataggcagaatctaaaaacacaattaaataatgtaaggcagcctatcctaacaaggaaatacaagaatatataatattagaaaataaaattaaataaacattagcctgtgaaataccgaataaacaaagcatgcaacggaagaagactctttccagataactagcatgttcaaccataactgggctcccataaagagcagattttgaattcttagcatatggttagagtaacaaaattgcacaacaaatacattataatctcccataaagagcatttagaagaaaattttaataaagatttcaatgatattagagacactttttattatgttcttaatatattactcctctttttatacaaatggaaaggctataatttatttattttttttaattttttgagatggagtctcgctttgtcacccaagctggagtgtagtggcgagacctcggctcactgcaacctccacctccctggttcacgccattctcctgcctcagcctcctgagtagctgggactacaggcgcccaccatcacgcccggctaatttttgtgtatttttagtatacacggggtttcaccgtgttagccaggaaggtcttgatcttctgacctcgtgatccacccgtctcggcctcccaaagtactgggattacaggcttgagtcaccgctcctcgccggcgatattttttgtagttttagtagagacaggatttcaccatgttggccaggctggtcttgaactcctgacctcatgatccacctatctcgaccttttaatgtgctgtgattacaagcatgaaacacagcactggcctataatttattatttttaaaacaaagaaaagccttacatttttacatatgggaacaacatgaatattgtaaaatatgctgtggaaaactacaatataataagcaattagaaataaattatactatcattcagataaatgttgaggaaagtaaatggaaacactaatgataagtttttctatgcagtgaacttagacacaaactaaaacttttcttaatgtgatgtgcatatcatccaattcactttttatataacacataaattcaagtatgttttctgaaacccctgaagctaaagttataggctaatttgacatacgtaaaaacaggacagggaaaacatacagatcacagtcccactaagctttatataagattaattaataaaataactcattaagaaataatgtaacagttaagaatttgttctattcctggcatgtttctaagtttttctatggattaaggtccttaaaaattctttgagatgagtagatacaataaactattccataggtgatatgtttggcatagagagttcacatttctaagttagtttctactaagggaaagaaaactttttgacctacattaccagagatgaaaaaaagaataaagtgaaatagaagattcaactttatcatatctgctgaggtgctttgggctctgataaattttttttctgatttttttgcaggaacacatttgaaataataggactgaaaattatgaggaggaaacatttgtccttggtgtttctgaaatatgtgaaccaaaccccaatgcctgcacttttgctctcacaaacttctgacatgaggcacagatttttacaaaacagcttaacatagaagtctcacaaaatgtgcagatttcctcagatcccaaaaacaatggaaaagcactcagaccacaagagcttcatgggaatagcagaaagaagaggtgaactttggctgtcactgtgaatgccctggaatgttagtggatgaacagagaagccttagaagatttaagagcataataagcatagggtaggaaatttccacctgtggcagcaaaagaagtaaatttagaattttccagaaccaatttctttgaagcagaacttccaacaccacatttttaaggttttctccttggcctttgcacctctcatctttgttatttgtttattcttccctattggggtgttgcctattattctctctctttttacattccaaagacatttcctttactgtaggacaggggcatccacgggagactacagccatgagttcttagtttctgtttctggttgagccagtaaggccctttcctcatcccccttttccacttatcactagacacagaacccaaaaaccattgctgcaggctgctaaaaacctaaaacaaaacagagccataacaaaaacaaaacaaggcgggttggaaaagcttgctgtacgaggcaaccaggtctggcttatattcaccacatcccttcttctttcccagaacagcaattgggctcaagagaaaacgtccaacttttagtatatccctcagtatagaatgagaacagtggaacatatgttcaaaggtttggctttgtgggctaccgctgatgactagattctgtctccccaaacagggaatgctaaaggaaatggcagagtaatgagaatgataacttatgactgctgagaagagaagttacatgcttaccacagcctcagagaaacaaacactacaatcaactgcggaagcaaaggaccacagtgtctggaaaacaatgggaaaaaatatctttaccttaaaaatccacacacaagcccagagaagacacattgaagacactgttaatgaagaaccaggatgtacagcctcactgattgttgtattatcttgtagtaagcaagtttgtacatactacattacacagttgttttataaatttctgaatctcatcaaaagattgcagggcatacagaaaaggacgaaaacatgtcccaattgaagaaataaaataaacctacaaatattgatctttaaaaatctttgttgacttttaaaggtcaaaatttgtaggtttattctttgttgttgttgtttttgcattatataattttgaaaatcaaaataattatcaaagctccttaatgatatgaacactcctccagtccgcagggctccggcaagggaggagcttagacaccatgcgggacacccgggtggacccccaacccacgcccgaggctcagagcaggagcaaggacctggctgcaccaggccgaagccgcctccacccccagcggtcgcggactccaggagctccagacctggggtcgtggtgagattcgttgattgactgcgcgatggtggctgagttgcaaccaaatgggtttcatcaccttaaatggttttgaaccaatgaagctatattcccttaaagagacggacagcccatcgtgtgaactatagagtttgtgaacaaatttatattgggttcatagtggcatcatgcacacagactcctgcgagttcccctaagttcttagaggactgctttaccttttgatctgagagttgcaaagttccgtaaagaatggccctgtggataagcgctaagtcaagagacagcgattggacagaatttgtgaaggaattcgccgccagatcacgaaagaccccctaagcccccgctcactggcagcgttcctggtcggccgtgactgcactgtggacatgcccatcctgaaggccaccgtggccttctatgatgcagtccacgcaggaaatccacgagaaagttctaaacagagccgtgggccccatgatgcaccacacaatcacctcaccagggaggttctggcaaatttcaagtccttgagagtgatcgtgggggtgggcagtggctatgacaacgtggacatcaaggctgccagcgagctcggaattgctgtgtgaaacatcccgtccgcagccgtggaagagacagccaattccaccaactgccacattctcaacatgtaccggaggaacacatggctgtaccaggcactgtgggaaggcaagcgggttcagagcatggagcagatctgcgaggtggcctcgggagtggcccgcattcgtgggaagacgctgggcctcatcggctagggtcgcacgcagcaggcttttgcagttccagccacagcctttggattcagcgtcatgttttattacccctacttgcaggatgggatcgagcagtccctgggcatgcagagggtctacaccctgcaggattggctgtatcagagcgactgcatctccttgcactgcagtctcaacgaacttaagcaccacctcatcaatgactttaccataaagcagatgaggcagggagcattccttgtgaacgcagcccgtggtggcctggtggacgagagagccttagcacaggccctcaaggaaggcaggatacgaagggcagtcgtcgacgtgaacgagtcgcagccctttagctttgctcagggtccgttgaaagatgcccccaatctcatctgcactcctctcactgcctgctacagccagcaggtgtcactggagatgagggagacagctgccaccgagctccgccgagccatcacaggtcgcatcccaggaagcttaagaaactgtgtgaacgaggaattctttgtcacatctgtgctttggtgggaaatagaccagcaagaaattcatccaggcatcttgggcgtgggtccaggaggacttcctgcatccatggaagggacattccctggaggcatcccggtgactcacaaactccccacagtggcacatccttcccaagcaccctctcccaaccagccctcaaacacggggacaatcgagagcaccccaacgagtaataacagagaatgccggaaggtaatcattcagatacacttttgaagaagagacagtgaaaaatagacaaactaagagaaaaagaatctgacgctctttttagctgattctggacatatgctcattggttttgcactgttaaaactgcaagacctagaaaactgcagatgtcgtctgcttacggaagctctgaaagactaggatgtgatttattaaccaccaacttccgttattatgtgtttagtttttcatctgtgcatcaaatcacaaagaatgaatacaattttttcctttatcagtcccttgggcacagcaggtctggaacaccctgctcagaatgttgcatcaagacttcaaacatcaaaataaaaaccatgaggaggaaatccccatcttgtgacttgagtcccttcagtctacagggactggttacagcattttgttaataggaagatcacattactagaaaatatggagtaaactgtttgcctatggtagacatcctcacacataagattgaagacagtaccggctcctgtacagagaagcgtctctcacatctgaactgcatactgagcgggcaagttggttgtaagttcagtaaaagcctctgataatgcaaaaaaaaaaaaaaaagtattaagtttcacacgctgtttgtaatcaagtatattttctcagtttcagatcctctgctattttatttagtgggaagtcttgcactaaaagggttcaagaaaaatagtgttgcattttcttatgtcacaggaaacacttttaatggtaacttgtcagattgtctatgaacaaacccactttttaagacattgataaagtcttcttttcttcacgttgtgttttatacaagaacacttcagctgtattggatgtgactgattttaacaaattatattagatttgcatcaattagttacatgttctatttatagtcttttgtgaatatagtctttttgtttaaaaagatggcctgttttgatcctttgattaggtacattcccgtttttgtaagaaaagagaaatttttaagactgtcccaaacagaaaaataatggctatcagaagtacgttttgttttagtgtagtgcgaattaccgttactgtagttgtttattgtaaagatggacatttagcattcagtgcagttttcaataaaatgtgattagaaaaaactgcttaatgaacaaaaacagaacatagacaacaaaagaatattagaagaagtgatacataaagaaaatgagatatcaataaaaagatttttaaaaaccaacaattgtgaatctgaagaacataatagctatattaaaaatttaatcaacagtcacaaaagcagactaataaaggagaaaaaattacacaattgatgacattgtagttataaatattgagtgatgaaaacaaattttttaagcagaatggaggaaaaagtatgggaagtactgcacatggtcaagtggaccattatatttatgaaaggagtcttacaaaaacaatataggagaaaagtaataaagaggttatttttaaaaagtagctgagaaatccccacatggcaagataattaaacaagaagaaatacttccaaacaaaaaccttcaactggagtaatatcacttcagaaataaaaaaactaaacctttccaaataaataaaagttgattgtgttactaaccactagaacagtcctaaaggaagtgtaaaagagtctatcacgtccaaaaatgaaatgatgctgcagagcatcataacagcacatgaaaatagaaagctctctattaaaggtaaatatataaacaggtaaagaaatctctactgtcataatcatggtgcacaaaactttcaaaatattgccatggagtttaaaacatgaggcagaaatctgcataaatttgtgatcatagaccataaggaaagataatatgcgatattaataaaacagtgggggtgtcaagaggtacaactttgcattcagttgaaatatagttgttctatactgtcataactttaagatgatttatgaagtctttatttctcaggatgattaccaaaaaaaacctgtagaatgtatgcaaaggcaaatgagaaagaaattcaatcacgtcactacaaaatcaacaaacagaaataaagcagtaagagaaaaaatgataaataacacatctacaagaaacacagaagacaattacaaataataaagtaacttcattaaatgcagtaattacttcaaatataaaaagttaaataccttaaagaaaattaataaataatttaatggattaagaacaaagaagatccagcaatttgctctctacaagagtcacttcagctctaaggactcaaataagttgaaagtaacagtataaagaaaatatattttattcaaagagtagctaaaattggagggccatggtcataattatactaaacaaaatatattttaaatcaaaaatatgaacaagagacagattggtattgtgtttttgtttttgtttttggagacagagtctcattctgtcaccaggctggagtgcagtggcacgatctcggctcactgcaaccacaacctccctggttcaatcgattctcctgcttcagcttcccgagtagctgggactacaggcacacgccgccacctcacccagctaatttttgtactttttagtagagatggggtttcaccttgttggccaggatggtctcgatctctggacctcatgattcacccgcctcggcctcccaaattgctgagactacaggcgtcagccactgcgcccggccgagagagattggtattatgtaatggtgagatggattaactttccaggaatctataacaataatttataaatcatatatatataatttgaaaaatctgcaaaaatataccactgagattttgacaaaaattacattaaatttttgtattactataaatagcactgacatctttctttctttttttttttttagagacagagtttctttctctctggctggagggcagtggcatgatctctcgataggctcacttcaacctcctcctcccaggttcaactgattctcgtctttcaaatatgtaaaacaaatattgacagaagtcaagcaagaaatacatagcaacacaacaatggtggacttcaagactccactttcagtaatgactagaatagtcagaagtaatatcagtaagaaagccaaacctgaacattatagacccaaccagcatttacagaactctccaatttaaaggagcaaaatctgcaatattctaaatcacacatggtacattctgttaggatacatgtcttattaaatttaagaaaactgaagccatacaatgtaaatgaaactagaattcaaaagcaagaaaatgtggcaaatatgtaaataagaggaaattaagcaaaatctttcatatagtcttgctcaagtgtcaggtgatttaatattgttaagatgtcagggccggcatgaggctcatgcctgtaatcctaggactttgggaggccaaagtgggtggatcacttgagatcagaagtttgagactagcctagtgaatatggcaaaaccctatctctactaaaaatacaaaagttagctagacgtgatggtgcacgactgcaatcccagctactctggtggctgagactggagaattgcttgaacctgggaagcggagcctgcagtgagcacatctcgcacccctgcccttcagcctgagtgactcactaaaactccatctccaaaaaaaaaaaaaaaaaaaatgttgtcagtactactcatgatgatataaaaatgtaaggtaatttttgtcaaaatcccaatggtattttttttgcagaatttttgtgtataattctaaacgttgcttaggacaggtgactagccaaacaccctttaaaaagaacaaagaggtattacattttctgattcaaaatcatgatacaaagctacaaaaataaaaacaatgtggtattgccacaaaaacagatacatagatgacgaaacagaatagagatcccagaaataaacccttgcatatgtgataaaataatcttccgtaagctttccatgaccacacaatagaaaaataagaatccatttaacaaagagttttccaaattgaatatttacagagaaaaaaataaagttggatgcttcctttgtatcatatataaaaagaaaagtttttaaaatgaattcaatacttaaacataaaacctaataaaattcttagaagtaaacataagggaaaagtttatgacataagtcttaaaactctttccttaagtttgacatcaaattcataagcaacaaggaaaagaacaacgaccaagaaaagggactacattaagcttcaactattctacacatcaaataaaacatttagtgccatacaaacgtcacctaataagtgggtgaaagctaggcatggtgtctcatgcctttaattctacaactttaggaggccaaggcagaacaatcacttgagaccaaaagtttgagactagccatgaaaacatagcaagaccctgtcttgtatagggttatatatatgcatacatacatacatataactaaaaagagtaaaaatattttctaatcacatatttggtaggtgttaattttcaaaatatataaattcctaaaactcaacaacaaaaaaagttaataacttgatttagaatggcacatgtttgaaatgactttctccaaagaagacatagaaatgactaggcatttaaaaggatactcgacaactctcttctagaaaaatacaaagaaaagtcacaataatctatcacatcaaacctatttttaaaatagtatgaaagctcttcaaaaaatttaaaatgagattattatacaatccagcaaaccccattctggctatgtatttaaaatatacaacacatgatccggaagagatatttgcacacccaaatttattgcagcattactaacacaagccaaaaggcagaaacaacccagctgtcccttgaccaatgaagagattaacaacaagtggcacatacacaaagtcgaatattattcagtctttaaaaagtcacattatatgattattcttgagaatatcacgttaactgaaataagccaggaacaaagtgacagtctatgattccattcataatcaggtatcttaagtagacaaactcatagaaaaaaaaagttagaatggtgtttgtcaaggactgaagagatggtaaaatgggcaattgtcttaaaagacatttaatgttagttttgcaagacatagaagttctacagatcttttgcataactatgtgaatgtacttaacgctaatgaaatatacacttaaaaagaattaaaatggtaaattttacattatgtgtttttaccacaatcgcaatttttaaaaggaaaaatatggacttataaagctttccaaaaattaaattttgttcacaaaagattttctctcacacaaaggaagtatagatttataattaaacacattgtgaaattaagattatttcaatgactattcatccacacaagataagacaaccactgaaaatcagccaaaaaatatggaagataagccatgagcaaagttggggacatatttatagagacaaacacatatataatttaattttgaaaacgtatgaccgatttatattttaattaaacccaacattagtttcctgagtgaaatttggttttcagtttgggcaaatgaagacctttctgtggttaaaaggattctttcttctccgtttcttcatatggacctgtgctggggattggtcagctgttcaagtgcaatgcactcagttttggttctgtgccaggattaaacctacgatatttcacatttcatatataaaccccgatgaagtgtttctaggagatggctgcctcataacctatattttgccaaatgtttactatgaatttcaccaccatcctcttgaaggtggtattgtaactaaaactcttcaggacattctacttaaaactaaaatcacgtatatctcaagaaactcctttctgatttgaaatgcctctgtcatgtattgtctgcaatcagcctcctctttaaaagaaagtagaaaggacagatgaggaaactgatagtgttactgcatgggagacagaggtgaggatacacatggcggatgaaaacatggaagttatttctacagcacgatcttgtaagtgtctgactgctatgctcccttgtatatcaaatgatgtacctttattgcaagagaagatagtgcgctgtttaccttgacattgagaggcaattttgaatctctgtcgtgattgtttaggactgaggatttaatgtgctattttgtggaaatcttagaagcagtaatgggatttaatgatcttaactatcatccttctgaaaaatctaacgcgattttaaataaaatggccggctgcttccaccgttccctttttaaaccaggagctgccgttgcttttaacattacgaagttgaatctatgaatagtttgtactattaacatttttttaaaaatccacattgacttgaagtgtacaggcagagttggaaattataacatccaaagttataatacataagtaaaacccaaaataaaatcaactgctgccctggaacctattataaataatcgagacagtaatatggaattgtaaagaaaaataagaaacatatttactcataaaatcttgcaagcaaagtttttttctttttttgagacagagtctcactctgtcacccaagctgaagtgcagtggcgagacgacggctcatttcaacctccgcctcctgagttcaaaccattctcctgcctcagccttcactgagattacaagcacctgctaccagaccaggctaccttgcatataaacttgatatatcatttatgaaaatactttttagataactaaaatattctactgtgactgtgcattcatgaagttcgggtatcttgaatcattggcatgcagtgtgtgacagtaaaatttcacagaaaatacactgtaaccattaataaaaggccctaataagagaattttaatgcataagaattgaaaagacaccataaataatttccgttgtatttttaatacactgatgctattcttacacaaagtaaaaaggctgggtaagttgtggtggctcacacctgtaattccagcaatttgggaggccgaggtagcagattgcttaagcacaagagttcacaacatgcctgggcaggatagggagaccctgtctctgcaaataataataaacagccaagtgtgttaatacacatttgtggtcccatctgctcaggaggctgaggcaggagaattgcctgagcctgagtggtcaaggctagagtgagctgtgattatgcattgcattccagcccaggtgacacagtgagaccctgtttaaagaaaaaaacaaacaaaaactaaaaattaaccaggagtagtggcatgcacctgtactcccagctacttcagaagctgaagttagaaaatcatttgagcctgagagtttgagtctgcagtgagccataattgagctactgaactccagtctgtgtgacagagcaaggccttgtcatagatagatagatgatagatgatagatagatagatagatagatggaatacacctggagaaagagtaaattttaatgtagtgtgatgtaatttttaaaataaactttatgtgtgtatcacttagaaatttatagaacaggccgggggcggtggctcacgcctctaatcccagcactctgagaagacgaagtgggcagatcagggggccggatatcgagaccaagaccatcctggctaacacggtgaaaccctgtctctactaaaaatacaaaaaattagccgggtgtggtggcgggcaactctagtctcagctactcgggaggctgaggcaggagaatggcgtgaaaccgggaggcagagcttgcagtgagccgggatcgcgccgctgcactccagcctggacaacagagcgagagtctgtctcgaaaaaaaaagaaatttatacaacttagccagaagaataaaaaacaacctcttaacagttttttcaaataaaaaaagtgagtttgaagagaagggaataaaggggactttcagtttaatgtgttttttattttttgagtcagggtctcactttgttgcccacatggaagcgcagtggtgtgatttcagctcactgcaaacttggcctcccaggctcaaacaatcctcccacctcagcctccctagtagctgggaatacaggtgtacatcaccacaactggttaatttttgtatttttgtagagagagggttttaccatgttgctcacactggtcttgagcttctgggctcaaacaattcacctgccttgggctcccaaagtgctgggattgagccactaggccaaccaagttttttgtttggttttgtttttgagatggagtctcactctgttgcccaggctagagtgcaatggcacgatcttggctcactgcaccatttgcctcctgggttcaagtgattctcctgcctcagcctcgtgggtagctgggattataggcacccgccaccgagaccagctaatttttgtattttttagcagagatggggttccaccatgtcagctaggctggcctcaaattcctgacctcatgatccacccacctcggcctcacaaagtgctgagattacaggcatgagtcactgctcccggcgaccagccaagacttttactttataaagatatttatgatgttttcttttctttttacagtacgcattgcatttataattggagatacaaaaaaaggtgactgttactgtttgacagcaaggcagtagtattatcttcatcaatatttgcaacttaattcgcaggaacctgtaagagaaagcccagacaaaactttaaggcaaagaagttacacttgtaaaaaatgagaggactatttttttataataacaaatattccaggtgaggactggtcaggatctaccactgctccatctcacttgataagtctcatgcctgccagggtaagaaggagcagagagaaggacaaatgccagtgagtttcctctcccactaaggatctgtttgtcaagtttcctaccatcaagtggaagatgtactaaaaataaaatgtacccttgcagatgctagcagagaggcacaaaatagaaaaggaggtaagcccatatattgtggagaaagagatccaacttaagattcaaaatgcaccagaaagctgtgtaaagttaataaaattactcaaaatcttggaacatttgtttcctcacctgtaaaatggggatcatgtgcctacttcataagttgttttgacagttaaattcacagagatatttaatagagcctgctatggcaagtgttcacattaacaaagtagtatcaaacttcaaaatatgggaaaggtattttgaataatgtctatgaggccaaggacaacatgcccagcttcacaatcaatcccagccacattacactgaggagatctacaggcaactatatttcttcaacaaattccattagagaggaagagtgtgtagtctgaaaacatgacacaaatgtgaccagtgtacagtgacttaggtagtcgggggtggaatccctacatattctctgaattgcagctacacagtgagttcccaggaaacaaatggaatagaaaaggtgacacaaaatatactaccataaatggggtgagcatagcaggttcacaaccacaaatgtaagcaggagactcaaatcaccaggagcacctagatctgtgaacagcagcttgtggtggcatcaggttcaactttctgagaccaccggtgtgggcagtgtctttgcaggcacatactcggcagcagtgtatctgaagacagatctcaaggctcttctcttcactaattattaagatgatagatgatggataccctcacgttacaacatccccactaacgctgtggacaagtgaattcagaaacccacacctaaatacacagtgaagagtaggatgagaatactgcaggataggttaggaatgcaggcattcgaccccatagagtctatttaaaataagagaagggccctagtattgtgctgtggtcctcctatatatagttctttatttttccaatttcataaaggccatacagtttttcttcctttcttcacaaatgtgctgatgaacccatgagtaattcatcctgaaggggttaattcctcataaagtacagtaacgtgattcaattgctatgatgaggtttttcaggatttttttatagtgtcccatactcaccgatcacaagtgaaaattataagaacatgtaatttgaacaaagtattcttttcacatagagaaatacacaggtttatacagattagatgcatcatcaaagttggtaacatctgggaacaaaaggaactatcctgaggacataaggaacttagggacgtcgattattaagaggctacctgcaagtggaacttctgggttttcattgtctagacagaaaaatttaactcataagccccagtatattaaggtacatccccaacggctgtgggggatcaactttccatccaaagcagagatgtaaaacatgaatgacttcaaatgcggctcaagtgctctgcaccttgaaagtcatccccacaaagctggagcaccacctgttcctgagggatgaggtcaccaactgcttttttgagacactcgtcagtcaggactcagttgagatgaggctggtgatttcaactgtaaaatatctaaaccatcgtctttaggtagattcttatgcctgggaattgtggttttctcctctgctgttagcagatcctgagtaacccaagaaatacccgctctcacccgtcaagttctatatcacaagaaaggcgctgcagacggtgacattttcacgaaggagccacagcccgcatcaccccctgaaagctctgaagttgcgcacgggtgggtcacgcagcaggtggatgtctcagttcccatagagtttagcagagcaggcggctccctgggctggaagaggtgcgatgctctggaaaccccccgcgggtgtgtatgtgagaggacaccgagatgttcagcgggctgttcagtgaggaccagacccctccgatttgagcaagggaggtgcacttcgcagggtcacaccgtcctcatcgcccagcctagacctgcccctcaagtccttctgcggactcccttggcgagggggtggcacagaatcagcatgtggcatcgcttaggaaaggacgagtccacaccgccctgtccctccctccagggctgcgcaccacggggtaggacagacagcgcatgctggttttgtagttagcaggtcggcgaccaatgggctggaaaccgttaagacaccataactcccagcactcctagctagggacgcgcctccctatccttcgcttccatactacacaccgcccccaaacccagcgcatgctgagattgtagtccgttagcctcgcgaccaatgggctggaaatactgaaaggactatgactcccaggatgctttgcgaggtacccgccgtcccgatccttcctctagggctgcgcaccgcccccaagcccaacgcatactgggattgtagtcaggtagtcctgggaccaactgactggaaactgttaagagaccataactgccagcacgcctggctaaggacgcacctccctatccttcccttcagtgctacacaccgcctcgaagcccggtggctgctgggattgtagtctgcaggccgggggccatcgctggaaaccgttaagagaccataactcccagcatccctggccagggacgcgcctctctatccttccctccagcgttacacaccgccccaatcccggtgcatgctggcattgtagttcggtagccttgcgatcaacgtgctggaaactgtttaaggactatgactcccaggacgccttgcgagggacccaccctgttgacccttcctccagggctgggaacctcccttaagcccagcgcatgctgggatcatagtccgactgccgcgacagaaaggctgggagtggatctgagactacagttccaacactacggggaaaatttcatcttctctgagactacagttccaacactgaggggataatttcatcttctcctccgcccctccatgtttccagtgcaattccgccctgctgaggggagcctatctgttcccaaacttctgcgtgcgaggagacagcgtggccagggcaggtggtctcacttgtaattgtggcacagtctccccacgtgccagttgtacgactatttgtgcctgaagtttgatttctctctgacaagacagagcccgggagcctccaacagcctgcccagcgttgctgtaacgcttgctttcggggagctgggcgcgcccagacctttgcagggcccctccctcagccccgacccttctcctcgcccctcccctgccacgcccctttcgacatgctggaaagtcatctacctttaataacagtcatctttgcaaaaaaaaaaaaaaaaaaaactctgagaataacctatctcccattctatttagtatttatttccatagtatccataaatagtagcaattagatatcacagcaagtcaagcaaaagccctgccttgcctgtttcataaaccacgatatggccttgctgtggttttatttgtattttgttttgtatttattgaccttttggatataaatatttaggtatttggacagtttttggaagtattccgctattagttgttgatttacttctgttccctatttaattattttttgtctctcccttctccttagactcagtcattccacaggtctcgagagttctgttcatttcctttaaactttttgtacttttttttttccagactggataatttctattgctgtgtcttctgttttaaatctatggctaaactcaaaagatttttttcatttccttatctataatttttttatatatatgttcatttctctgctgaagttccacatctgtttgtttatgaatagaatattttcttttttccccatgaacatattcataaaaactgccttcaaattcttgtctgctgattgcaacatcctgggatagcttctactgcctgcttttgatattgtgtatggatgacattttcacgtttctttacaagtcttatgaattttaaaattgtgcactagaaactataaatgataattatagaatagaaactctggattttgctgttttaccttgaagacttttgttttataaacagggttcattgggctagtgtcaaaccaatgcttatgtccgctacagtgggtatagctgaaatcttcattcagttgttaaacacacatatcatatatgtattatgcataggcgtttttctataataatatattttattcaagtttcatcattgttatttgtgagagttcaacaagctagtccacacttagtggaagtcagaacctcagttttatttgattgtagcattttatataaacaaaattatatagtatgtatacttgtacatctgttttctttatttccttttctgttttctttctttctttccttttctgtcttctttctttctctctttctttccttctttctttctctcttcttttttctttctttcttttccccaggttggtgtgcagtggcatgatctcactgcaacctctgcctaccaggcttaagatatccttccacttcagccttttgagtcactgggaccgcagccttgcaccaccatgcccggctaattgttttgtatttttggtagagacagggtttcactatgttgcccaaactggcatgtctgctttcttttatgcaacattacatttgtgatattcacccaccagttgcaaatagctatagtctgttcattttagaaagtagtttttaccttttagtaaaatataaaaatacatgaaattaaccattttattattttttttgtgtgcagtttaaagaaattaaatacattcacattgttttgcaaccattgtccaagttcataaggaactgtttttcaatcttttaaaagtgaaactctgtacccagtaaacaacactccccttccattgccctttgtgtagtccctggaaactactcttctacttcgtgtttctatgaacttaactgctgtaaatatctcatatgagtggaaagagacaatatagcaaaaaaatcatgaggaagaataatatatactatataacatatgtttatccattttaagaaaaatgctagcagagatcaggtcatggtgtttatagagaaaggtaggtaacagtgaaaaagggattggttgcattaaatttacgacgtgatgcctcaagtgccagagtagtgagctttctgccccactcgcagggctggtcaatggtgtggctggaaccctacttgagctgcctgactgccagagcccatgcttagtacaaacttcaatgagccatgaaagcaattccaacaacaggcacttaatggctctgagattttatcacagcctgttcttcatggctagcaacttcagagaagagtgacagctgtgaggttccagaagccacacctcaggtcccccagttcctccccagcagctggagtccaggtgcaacaggacctgatgccggccagggaaccatggccacacgctgtgtgaggctggcggcaagacagtctcccctcctaccctctgctcatctgctaggtctttgccttttattctgattgtgctgctccaggcttggaacaaagcccgaaattcctcttgagtctgaagatgatgatggtttccagctgtgtggaactgctgcatctcctggaggactttaatcttctggaaacagagggaaagacaggatgctgacagggcctgggtgaaagactctgtaggggccttataaaagaagggaggagggctggtctctgaggtgtttcttttaaggggctctcacctcccctccaatatcatgcagccctaactggttctcagagttgaatgtaaacggcccttcctctaggaagttgtcatcaacttcactcccctgattgcaccctgcattaggataggtctcctccttctctgtgtattactccctttcaataaatcttagatgcggaagaagggaccagggaatgtcctgcccagggtgatttctcatttccacctccaccctccctcaaagtgaggacttcagctactgctcacctttctgtttttctgggttttgatcacatttctctggaagacagaaagccaaagaccatcagaaaggtccgctggtccataactagcctccatttccagcgatttccaagcttcaccactaccagagccaccagggtcagggaatgtgcacaaaagaggtcttgcagctctgcagcttcactactcagggagtgggactgatggctgctgtggagcctccatcactcatgagtaaaataccctgtttacgggatggggagggctgcgaggccctcgcaaaaaattttggcaaggactgagatctaggagctcagttcaagactctcttctcccaggcctcaggatcctggtccctgacctgtcttctccaggctcactcacatccacacactccttcatggcaatgtccagcatcaccacatcagtgaggaatgtccccagagagggcatgacttgggaggtgcccacccaagtcctgtccgctgaactcttataaacccctgcctcctggcgccctctacctaggttacccacttggagtagctgagaaccctcagctgccttttcccaattctctatgtcttcccattagctggcctctattgccaccaacctcaccataattacctccttggtgggattttaacaagccacaaggtcatgtggtccctggctccacctgttttaaaagccacacggagcccagctctcccaggccttgctctggtctgtctaatgaaggtgttttaggcactgcagccccaggagaaaagggctggagtagaaaggccctctgcttttttgatttggaggtttccagctgggagaagtaagctctgttctctgaaaccctggagcccttccccatcacagacacattcaccttctgctgtcacagcctcatctaagctctctgaggctccgctacagggtagacaacttgtacggtgttcacctgctaggatgagggacaaggtcagtgaaaatatgcttctttcagttacgcctcagccacactaaccttggacacggataagtggcctgagtcagcttgtccaatgctctgaccatctccagtaagctctgactctagactcactcccaggtccaacactccctggatgtgtcattttgggcatgcagtcgggtttccctgagctgtttcctcaactggaaagtgtggtgggaaccaaccacctcacaaggcctcttaccacctcggtttcatgtggttgtcatgattgctgtcaccatcttccctctcaggatgagccagacacaagcaccctcagattctctgtctccctgagccccatcaccaccttgtgaggcctgcccaacaggctcatcattcctacattttccacataagaaaacagaggcccaaagcggcaatgacatgccaaggaccccacaagagaggccagctcctccctcaacctagagggactgtcccggctgccttcacctaacaccctagcatcatcactgaccagcattccatcttctaaactctatgagtgacaatattcccagccaggccctgtggcagtggacatggttctgagaattgggaatctaatgtggaggaaaagttaaatatttaatatgaactcaattgaacatgggcacaaacaatggtcacgaagtcctggaacaggttgcatgaaccccttgaggtgttcatccagcgctgtttcagagaaatctttcaatccattcctatacattagttattgaaaaaacaacagacaattgcaaaaacaagttgatcttttgtgttccttgagcccagttgtgaagggcacctgtgactgcgcctcatgccaaacaacacattacaaaaagagctagggtcccagactgtgctgaagtttcatgagacctctcctcatctgtgcatggacacgtggctgactctggagcccaggctgttgcttcccagtctggtaatgaatcctccatagtctggtgcgtgtaaatatacatatacatatatgtatatttatatacatgtatatgtatataaatatacatatatatattttctttctgtccttcccattgcaatttgcttattatattatttgcttatcaagtctgtattgccatacacttgggataaaggctatttatccttaaaactattgtgggtgccttttcttttcccctcgttcatttcccgcaccggagcccaggtgatggaatctcgaagtgacctcacttccttagttacaaactcaaagaaagtttagaactctggtaacctggagccctaattctagagacagctttgtatttactaaggagactctgaagacagcaagatgttctcctgctatgtcttgaatttctgaggctctcatctcaggaaggcttgaacagagagacttttttttatgatggagacagtgctcattctgcactgctggctcttctggccatttggaaagggttacccatagataacacaaggccacccatggcaggcctatccaggccaggcctcacctttgatatcatctcggcaggcacacacccctcctcatctccacgtctcgtgggaaagaaagagataatgggtcctttcttggcaggagcaggtttccaggtattgggaggctaaaagcctgtcaaatttataccgcaggttacagttggcaggaggggaaggtgagtgctgggggtcacctttgtttgttcagacatttattctaaggcttcaagctgtcctcttgttttctccctggctggaggtctgcgcaaatgctcctatgtgcctgatctggggagtagactttctaactggaatttcccctgtggggaaagccaggatgccattgatgcctcttggccaggcttccaggcactctctttgcagaactctattgaggagatccctgaggagctgtttgatgagtccaactactccatctcattgaacaaaaggcaggtgcatcatgccaacaaccatggcccgtgctagtctggagtcaaggtgggcacagagaggtctccaaatggaaaagaccagggaagcccaggaccctgacccaaatgtgaggattccccagaaaccgttttagggctttctccattaaggacccacagttccttcccagaggaatttggcctccattagtccataatggcaacttaggtgcacagtccctggtcatatgcttgcaggaatgtcaaaagaaacacttttgtgttgttattactttacattaagttgtgagtatctttgcattttgctattatttttattgttatatctacctaccccacatacttcctggagcaggcagcttcgctgccttgccagaccttctctaagtcttagaagttcacactgttactagagagaggtttcacccaaaaagtgggagttatgcaaaagggtcttatatgactctttacatatgtgtcccagagcccacctctatagccccatcaggacaggagctgtgtcctcatatgtctttataagattccataagtggggcctttccctcagtaatttaggcttttaatactggtggagcctgacataataaattctatttccacttcagccatgctacagggaatatctttttttttttttttttttttttgagacggagtctcgctctgtcgcccaggtgggagtgcagtggtgcagtctcggctcactgcactctgcctcctgggttcacgccatcttcctgcttcagcctcctgagtagctgggactacaggcgcctgtcaccacgcccggctaattttttttctctgtgtgtgtgtggttttttttttagtagagacagagtttcaccgtgttagctaggatggtctcgatctcctgacctcgtgatccactcgcctcggcctcccaaagtgctaggattacaggtgtaagccaccgcgcccagccgctacagggaacatcttatctgtgtcctaataggctgtaacgctttgctatgacttccctaatacagtaccacaggctgaagttctttaacaacaaaaactgaatgtcgcacaattctggaagttagaaatccaacctcaagctactggctgtgtggtttctctgaggtctccatccttggcttgtagatcgtcatctactatatctgtgttcacaagatcttctcttgtgcttttctgtccttcctgcctcttctaataagggctccagtcatctggaattaggatacaccccaattaattcacttaaacctaactacatttgcagaggctatatgttcaaatatagtcatgttctgaggcactaggtgttaggacatgaacatataatttttaggaagggaatgcaatctagctcacaacatttactaatcccttgtagattatagtctcccaggaaaatgattactcagtgaaacagtaggaaagtgtaaaggtttaataggagaagccggaatatattccaaaagggttgtgaaagccgtactgtaaatagtagtttctgaatttatctgcttttatgtatccagaacctcttggttgtcaacattcttttaatttttttgtcaatctgctatctatgtggcaaaaaaacatgtttctatttcaatttttcaactgatatatttgagttacctttcagttgatttatacttatttgagttttctgttccctcagttaatccgctcaattccttggccctgtgaggggtttctctcaccttggagtccccaagcactgacacctttgtcaggtgtggggttgctgtagttatttctcaacactccctttaaggttttaaaagacccagttcagttgctttaagtcaaaagggttgtcttagggtatcttatcctgtgccctgtctctaaaacagaaagaaagtgagccttccccatgcccttccccctaagtcagggacagacatagagcctcaggtagcttaaagggaatttcatgcaacccccaccgtggaagattctctttcttacttgtgtttttctgagcagccatttgacatcacaaagctttattttctcatttgtaggctgagtatgtttttttgggaattctctgggataatgctcttcataaagattattaatacaagtgggtgctgttgtcttacagctgatatgatatcgtgaaggccttgactgtattcatggattaattattctctacctccacattaaatttgatatcagaggcctaaaacctttttcaccataaacacccatgtcctccacatgcccaagtctctgaaggatggagatttcctcatccaagctccacattccaagcctctggtgtttcatggtcttgccatgaaaagtcttgtcccctccccaagaggaaatgagtctattcttaacctagaggtgtgaatgatgccaatgcgccaaaccaggcacaacggagaagctgacgaagtccctgacagcagccttccagggtcaaactctcttctttttatcatttttctcaagttttaccaggacttcctcaccactctgtagttcctggaccagctgtctagtagttgagcatatgtcttctccaaggcacagtggtgactctgccagctactaactgtgtcttagcataccagtgcatctttatcagcctcaatttgcatctttatagagaattgtaaaatgaacctctgttctgtacgagagacatgcaaggggagaagaaaacacacccaaaaaaacctttaagggtaaacaagctttatctgacgtaaatggcagtgcagctataataagcaaattgcaatgggaaggggagaagggaaacatatatacatatttacgcccaccagactgcggaggattcattaccagaccgggaagcaacagcctcgactccagagtaggtcacccatccctgcacagacaagaagaggtcttaggaagtttcagcgtggcctagagccctagttctttttgtaatgagttgtttggcatgaggcccagtcacgagggctcttcacaactgggctcaaggaacttgaaaaggttatcttgtttttgcaattgtctgtggtttttcaataactaacacataggaatagattgaaatagatatttctccaaaacagtgccagatgaatgcttcaagcggctcatgcaacctgtctgagacttaatgaccattgcttttgtccatgttcaattgaattcaaatttaatatttaactttcccccacaaccttatatgttttttgtgagaaatgaatggcatacaatatgaaaagtggtttcctaatgctcggctttgtggaaagcctgctggggcatgctctgattgttcgtatttattacttttttctcttctttcaccccagaaggtctttcatgtcacagtgactcatgtccctctataattagacaatcatatagaaaacaaacatgttcttacatttgtaaagggcacttgagcttcctgttagctggactttgtccttgaaacagagagatcctgtaggaaagagtccccaggcacactcagacatagctaaaaaggttgtagttagggcttatttattcatcacatatatataacgcagttttccagacacttggcctaattcagtgaagacaacagatgacagttcctgggccacaatttacttcagggagtcagacactcagagtggacattataagcaggtcatgatcacagaatgtgagaactgatgttctcatgctctcctctaggaatggatgcacctgtcagcttctgatcagaacgacagacccaggatcaagcataacatttaaatagacgaataaaacttttttccaaaaaggaacatcgctttatgataaaaactctcaacaaattaggtgtaaagtaaattcacttcaaagcattaaaggccatgtattacaaatgaatagctgggcgggcagatctgccataaggcaagggcatccgcttccctagatacatatccaggggcacagagaatgagcagttccagggttgtgtctcacatggggtcctctccaggtcggtttcaagaggacaggactggggttctgtatccacttctgtggagagctggaagtaaaatgagctatgctccacctcagcctaatgtagacaatggctacagagaagactgttttcttcctcataaataggggtgctcgaagtgggtaaccttgattgtttcacatactcataagtgtctgccagccttgattcttcattggtgaactaagactctttgctctgaaactctgcagaaatgcttctactccctggaggcccttcaaatcagagagaggcatggccactccagaggcattttgggtagataaagatgggatagagctaaacgtgtcagaacactggaccctgagtctgaagtcatgggaaaatgccagttcctgttgggtttttgagctcctcatttgaaagtcgtattaaataatttccctggataaggggagggtgcctcatgagtaaatggcacactccaaatggtggaggcaaagagagggcaatggaggattccaaggtcactcagtgtacttggagccttcagattctgctcctttgtcctctggaactccaaagagtcagtgtcttgaggacacaaaacaatggtacctgatttgttccataatgttcctgcatggggctgcagtgttagtgatggcctggaggtggttacagcctgctgtgtttctggtgcctattgagctttgctggagcagctggagcaagtaagagtcacacacctcatgttattatcaacaatttccacattgcccacttagccaatcttttttcccttgcactcaccctttgccagctaccctggtgggtccaacatgtggcacagaaaatgattacatcatgcctgcatacccctccaaggacagaacagtctgaagtcagctcgacaaaagcactaaagcaagtatatataaaagaaaagagcaaggactattatataaagtagaatgttgagaagaagagctgcaaagtcattgaatggggggacccaaagtcctcactgaggtgatctttaatccatgatgagaatgataacagggaggcatctctgcacaagaatgtgtcagtgagaagccacccttggtgaagagtcttacaggtgtgagtttggcagagattagaaagggaccaatttggtacagacagcctgaggaagagataagcagaggcatggagaatcctggggcttgggagatgaggctagatatctgctcctttctgacaacattgccctaaaacttagcacctttcaatagtatatagtatctcacaatttgtgtggaccagaatctggacacagtttagttagctgcctctgccttcaggtctcttatgagattggggctgtggtctcaactgaatgtggaccggaaaagcatcaacctttaagctcatgcttgtgaaaattggcagggttcagggtagactgagagcatgactttacttctgtctactgcctgagcactccctccgttctttgttatgtgcgtctgtacatagagcatctcatagcattggagcttgcttcctctgtttgaggaatacaattgagagacagaattaggcaaacagtttcacacaaagagacataaagaaatggaaagactgaggaagcaaataggaaaaacccagtaggaggaataatgacagctttaaaaaaacttgagagttacaataatttgtattaaaattgtaacccccagtgtaatgctataaggagataggttgtaattaactcctgaggttgaggccatcatgattgagattactggctttacacaggaaaccccagagggatgtctgtctccttctaccaaatgagaataaaatttgatgtgtgcagtctgaaattcagaagagtcatcaccagagctcaaccatgctgataccctgatctcaaatttccaacctctaggagtgtgagaaattaaatcctgttgtctataagctgtctagttcatggttctttggtatagcagcctgaactaatacaaaagtcatacactattctgtattccatttgacagaagctgaatttgtgccttcaaactgttaaaaaaaaaagacttaaaaattggatattcagaatgaaagataagaaacagcttgttgaaacacttaaatctcctctgcttataagattttaaaaaattggctgaaatatgttggaagcaatatggccaactgaagtccatggagaatgagtttgctgatgttagagcccaaatttccgttgcatgtttcatattaacactccctgaatattcatgtgacctgtgaggaaacaagaggagatgactgtgcatgtctcatgactttccatattactactttccttccagcaatcccctcctaatccagagcccacttcttaagcattttttaatcaacaccttaaagcctatataaggaaactgatttcagctggactcctgtctcctgttggccaacctacaacaagatgccatttttctcaaaacccaagtgccatactactggcatcgagcagtaggtcattttgttcaataacaaactgagtcactaaccacctagtgctgggagactttgtgaaggctttccccaacttaggtgagataaggcacatggatataattctatatataataagaagtcactagaaagtttaatagttgtattagtccatttttataccgcaatgatggaatacctgggactgggtaatttataaagaaaagaggtttaattgactcacagttccacaagattgggtgggggaggctcagaaaccttccaattatggtggccaacaagtgaagtgagtgagagcaggggatacaccagaagcttatgaaaccatcagatctcttgagaactcactcactatcacaagaacagcataagaaaaacccgtccccataatccaatcaactcccctcaggtttctcccttaacacctggaggttataatacaaaatgaggtttgggtggggacacacagctaaaccacatcagtgccagaggatgatatctacatttaatttcaacctcgtactgcagcagaatgaaactgaagcccagtggggaagtgactttcccaagattacactgctggaccccaggcctacctgagttgtggcccatgctacctcccacctattctcctaatgcttccatctctaagtgtgtgcattatttacatgtgaaactacaccacgatttttacattttatcttatatacatctgatacattccctaggaagtagataacattatccccactgtgcacgctaggaggctggggaagcctcaaatacacagtgacttttattaggtcccagagatggtaagaaaaacaaggttattttccagctgtctcttatatcctggaacccaggatgcatttaggtctttccagggaattaaggggaagttgtgtttgcataattgtgtacaaataaagagttgacatggaagaggagactgagcaatcaatagcatagtggggcctttgggtaggtcttatagaaataaggggcccagtagatggaaccttgaagagtttaacacactttcctggtgacagaaccccacagcagttaagaaaccaggaacccacattcttgagacagctctgtatccacctctgttggtgagagatgctcaagagagtgagatgtcctttcattgtgccttgatatttctgagttctagccttacaaagcctcaatgtaaaagccttctctgataacacagatatcaactcagccctcattcctgatacccctggccattggccaagtgcacctacagataacacagagcagcccaggacatgtccatcgaggccaggcctctctcatcatctcatctgggcagccccacaccacttctttgtaccatgagttgcaggatggacaaaagagagggcacacttcttgggcagaagccgattgtcaggtgttggaactcttgtgtgtttgttatgttcatattcaggtcagagctggcagaataaaaataagagagttggggagtgagtctgtatactcagatgtgaatagcaagactccaacctgatctctggtttccttccttgctggagatttatttatttatttatactttaagttctgggatacatgtgcagaatgtgcagacttgttacatagttttatatttgccatggtggtttgctgcatctatcaaactgtcagctaggttttaagccccacatatattagatatttgtcctagtgctctccttcactttgccccctgacaagccctgatgtgtgatgttcccctccctgtgtccatgtgttttcattgttcaaatttcacttatgagtgagaacatgtggtgtttggttttctgttcctgttagtttgctgagaatgatggcttccagcttcctccatatccctgcaatctgaggtctctgttctgttccctctgtctatatatctgttttggtaccaatatgacttcctctcttcctatttgcataccctttatttctttcacttgcctgattaccctggccagaacttccaatactatcttgaataggagtgctgagggaggacatccttgtcttgtgctggttttcaaagggaatgcttccggcacttgcctattaagtatgatattggctaggggtttgtcataaacagctctgattatttcgagactttttccgtcaatacgtagtttatttagagcttttaacatgaagggatattaaatttaatctaaggccttttgtgcatctattgagaaaatcctgtggtttctgtcattggttctgtttatgtgatggattacatttattaatttgcatacgttgaaccagccttgaatcccagggatgaagctgacgtgatcatggtggataacattttcgatgtgctgctggtttcagtttgccagtattttattgaggatttttacatcgatgttcatgagggatattggcctgaaatttttgttgcggttgtgtctttgcgaggttttggtatcattatgatggtgacctcataaaatgaattagggaggagtccctccttttcaattgtttagaatagtttaagaagaaatgttaccagctgctctttatgcttctggtaaaattcggctgtgaatccatctggttctgagcgtttttttattggtaggctattaattactgcctcaatttcagaactttttattggtctattcagggattcaacttcttcctggcttagtcttgggaaagtgtatgtgtccagaaatttatccatttcttctatattttctagttgatttgtgtggagatgtctatagtattctctcatggtagtttttatttctgtggaatcagtggtgatatcctgtttatcattttttaatgtgtctatttgtttcttctttcttttcttctttattaatctagctagtggtccgtctcttttgttaatcttttcaaaaaaccagctagtggagtcattgattttgaacagtttttcttgtctctatctccttcagttctgctctgatcttagttgtttctttccttcagctagtttttgaatttgtttcctcttgattctctagttgttttaattgtgatgttagggtgtcgatttcagatcattccagctttctgttgtgggcatttagtgctagcatatcccctcttaaaactgctttagctgtgtccaagagattctggtacattgtctctttgttctcatttgtttcaaaaaaaacttaatttctctcttaattttgtcatttactcagtagtcgttcaggagcaggttgttcaatttccatgtatttatgtggttttgagtgagtttcttaatcctgagttctgatttgattgcactgtggtctgagagacagtttgttatggttgccattttttccatttgttgaggagtgttttgcttccaattatgtggtcaattttagaatatgtgctatgtggcatggagaagaatgtatattctgttcttctggcatggagagttctgtagttgtctattaggtccgcttagtccagagctgatttcaaatcctgaatatccttgttaattttctgtctcattgatctgtctaatattggcagtggggtgttaaaacttcccagtgttattgtgtgggagtctacgtctctttataggtctgtaagaacttgttttatgaatctcagtgctcctctgttgggtaggtatatatataggatagttagctcttcttgttgcattgatccctttacctttatgtagtgcccttctttgtcttttttcatcttggtttaaagtctgttttacaagaaactaggattgaaaccttgctttttttgttgttgttgttgctttttttgctttccatttgccatttctccttccctttattttaagcctatgtgtgtctttgcatgtgagatgtgtctcctgaatatagcacaccaaagattcttgactgtttaaccaatttgccaggctctgtctcttaattgaggtatttagcccacttatatttatggttaatattgttatgtgtgaatttgatcctgttatcatgatgctagctggttattttgcacattcgttgatgcagttttttcatagtatcgattggtctttatattttggtgtggttttgcagtggtgaaccatattttcctttccatatttagtgtttccttcaggagattttgtaaggcatgcctggtggtgacataatccctcagcatttgcttgtctgtgaaggactttatttcccctttgcttttgaagattagtttggctggatatgaaattctgagttgaaaattattttatttaagaatgttgaatattggcccccactctcttctggcttctagagtttctgcaaagagatctgctgttagtctgatgggcctccatttgtaggtaacctgacttctctctctgtctgcccttaacattatttccttcatttcaaccttggagagtctggcgattatgtgtcttggagttgctcttctcgaggagtatcttagtgatgttctctgtatttcctgaatttgaatgttggcctgtcttgctaggttgaggaagttctcctggataatatcctaaagtttgttttctagcttggatccattcttcccgtcactttgaggtataccaatcaatcgtaggtttggtcttttcacatagtcccatataacttaaaggcattgtttagctccatcaggccatttatgtttctctctaagctggttattctagttagcagttcccataaccttttatcaagatacttagcttctttgcattgtgttagaacatacttctttagctcagaggagtttattattacccaccttctgaagactacttctgtcaattcttcaatctcattctccatccagttttgtgtcattactggagaggtgttgtgatcatttggaggagaaaaggcattcttgtttctggaatttttggcatttttgtgctgttttttcctcatcttcatggatttatctactttcaatctttggggctgatgacatttggatggggttttttttgggtgggtcctttctgttgatgttgatgttgttgctttctgcttgttagtttttcttctaacagcaaggttcttctgcaggtccagtgcagtttgctggagttccaatccagaccctgttcacctgggtgtcaccagtaaaggctgcagaacagcaaagattgctgccttctccttcttctggaaacttcatcccaggaggatacccgcccaatgccaactggagcccttttgtatgaggtgtctgtcaacccctgttaggaggtttctcccagtcaggagtcacggggaacccacttgaggagacagtctgtctcttagcagagctggtgcactgtgctggcagaatccctctagtcaaaatcagctgctctcttcagagccagcaggcaggaatgatgaaatccactgaagctgcacccacagcctccccttcccccatgtgctctgtcccagggagatagaggttttctgtgtaagcctctgactagggctgttacctttccttcaaatatgacctgcccaatgaggaggactctaaagaagcagtctgccacagccactttgctgcacccaacccggaccttccagcctccttggcaccgtcaggggaaaactgtctactaaagcctcagtaatggtggactccactccctccaactgacctcaattggcccaggtcaacttcagactgctgtgctggcagcgagaatttcaggatgaggaacgcattagctgtttgtgattttcatgtctgttgcagggatttgacccattgttagtgctagatttggagtcttaaaaaacagatttatcttactgaactcaaagtacaacttgaagatgtactcagctgtttacttaaattaaagcgggagaaaatgtatctttgcagatctatttttatgtcacttgcttttagacacgagattgtctctggcacagtaattcaacttagtctatgtcaaaaacatagcctgaaaatgctcaaaaaaaattatgaatagcggattgtattctatgtgttctcaaatttcttctatgatgtaaaatatataacataatgttttaccttggatttctaacctcagccctcagccattttcccaatttttttttttttgttttgagacggagtcttgctctgtctctcaggctggagtgcagtggagctatctcggctcactgcaagctccacctcccgtgttcatgccattctcctgcctcagcctcccaagtagctgggactacaggcacctgccaccacgcccgactacttttttgtatttttagtagagacagggtttcaccgtattatccaggatggtctggatctcctgacctcatgattcacccatctcagcctcccaaagtgctgggattacaggcatgagccaccttgccatgccccactttcccaaactattaaaagaccttccaaggtgggtcaaaagcatttttcagagaagattattcctaacagtaaaggataataacagatggataaaaatctcaaataaattatgcctctatttgcagaagcgtcactctccagagtctccaagatccagagaatttccatgaggtagagtagtttatggacatttagcaaagttggtcctgactgctgtctcagcctcttaatagatgtgcagctatagacaatttactggacttagaacagttatataaacctgggctgcaagaaaacggataacactgattgcaagaatggcaaccacttctcattcctctctgatctgggccctctgcaatgtacacttgaggctgcttccatggagggaaagattttcttttcccaaatcttggatctggctggccttatttgctctgcctcattcatactttttgttctaataaaataattaagatgtttagcgtctcatcccagcctttatcttgttaaaactatatcttatgatatgtcatctctctttactatatttggttatattcattctattcaatactcaggtaattttttatctctgtttaatttagtgtttcacctataccttgtcctaatttttttattctttacattctaccgagctgtgattcaaatatgatatttgaatatggaaaatggtggcctagtttttcttcagaaatttctttttatttacttgtgttctttagtttttaacttggttccaatatttgggaaatatcacatttgagatgtctgtagtcatgttatttctgtgcttattccattttcccttggaggaaggtggacagcatacagacttgacatccttgtgatctatcagtatctgaagggaccactttttttcagtttgattacttctctggcttattctcttgatttactttagctttcatcaagtgcttctatatttttaaactgtattcattattttcatagttcttgtagcttcttgagaacttttacttgtctacactaaaatatttaaaaatatgtagccttttcttctgaaagcacaaatatgcagtgtacacatgagtagaatatttcataggcattgggcagcatacaaccacatcttatgagatattccgtttcttcattcaaaacatctctctcaaatatgtagtaatagtcacttgtaaggggtagttcttttgatacttaaaattttcttttatgtgcctttatgaaaatatatacttaactacagagaacagaactctgtgcttccttttagtatgtccttgacctcacaaaaataattcatgaaatcttatatttattttataaattaatttaatgaaacaaaatttgtgcatggctaaatattacttgttgagtacaatttagaatttctactgtcattttagtgtcctaaaagatatgagctgttgaatttctgctctcataaaatgaatgatattgttaggcctaaacccttgccatttattttccccctctgtcatacagtgtgtatctttggttcactgctgaaaaattttattaatttttctctcttgctagtagtcatactttctaataaagttatcattacttgtgtttatttagttactgtatgttaaacatttgatttctgatggtcttaatgtcatttaatataattgtaaatatttcaatttgtcattattaacaaatttctgtattatatgttttagactcagctattaagtatatgtgggtaaatgacttagaataatttctaaaacattgtaggggctactaagtactaataaccctgattcattaaatttttattccttataatattctttattgactaaattattttgtaatcttatttaaatttattcttttcttttctaaatatttgtgaaaaaggggttaggctaatgtgtcattttgataaaacttcatgtcaaatgatatgtttcactggtttcttttagatgtaatagcttttttgactcaggcaatacatgcaagtatgaagtataaaaattatagtctcaatccttaagctgagtaaaaacttggctatttattgattttaacaaagctacattatcccacataatacgtaaaactttcacaaagctacattatcccacataacaggcataccagctgcctatatctggaaacatggattgttacaaattagaagtaaataacttgataggcccaatttaacaaatgaagctcaagaagtgggagatatgagacctataatgaaagattaaattattttaaaaatcttaccacaaagaaaaatcagagtcaaatactttaactgttaaattatacaaaatatttcataaaaataccaatcctttacaaatacacaccatacatagataagagataaacaacccctaactactttatgaggccaatattactataccaaagccagacaaacccatcatgtgttaggattaatatgggtacatacggctgataaataaagacacataattctcaaaaagtactaataagttaaatacagaaacacgtaaaagtaattatacaccatggccaagtacaatctttttacaaatgaagtggcttaatatctaaaaaccaataatttaatacacaacattgataaagtgaagaacataaaatgatccttttaatagacacagaaaagcttgtgatacaaacaacactgattcattataaaatccttaacatactaggaaggaaaaacttactggaactactaaaaaggattcataaaaatttcccactaatattacacttgctgatgaaagactaggctctttgcctcacagttgtgggaaacagataagcatggctactttcgctactctactaaattgaactaaaggtgttaggcagagaaattatataataaaaacaaataaaacttctaaatttataaaataaacttttattgtaaatggcatcaacttatattcaagaatttttaaagagtttacaaaaatcaactggaactaataaatgagttcagcaggtcacaagatacaagataaatgcacaatattaaattgcacttttatacagtaactaagggcaatcagtaaataaaattagaaaaaataattctactcattagctcaatgtgtagtggcttaaaattccaaatatgcattatgtcttattttctgttggctacaaatactgacacagcttagttgaatgggtctaccacaatgtcctcatgtgtccggaattggtcggttcttggtctcactgacttcaagaatgaagccgcggaccctcacggtgagtgttacagttcttaaaggcagcgtgcctggagtttttcccttctaatgtcagcatgtgtttggagtttctttcttctggtgggttcgtggtctttctggctcaggagtgaagctgcagacctttgtggtgagtgttacagctcataaaggcagtgtggacgcaaagagtgagcagcagcaggatttattgcaaagagcgaaagaacaaagcttccacagtgtggatggggacccgagagggttgccactgctggctcgggcagctgcttttattctcttatctggccccacccacatcctgctgattggtccattttacagggagccaattggtctgttttacagagagctgattggtcccttttcacagggtgctgattgatgcatttacaatccttgagctagacacaaagttcaccacgtctctactagattagctagatacagagtgttgattggtgtatttacaaaccctgagctagacacggggtgctcatttgtgtgtttataaaccttgagctagatacaaagtgtcgattggtgtatttacaatcccttatctagacataaagtttctccaagtccccaccagactcaggagcccagctggcttcacccagtggatcccgcaccagggccgcaggtggagctgcctgcctgccagtcacacgctgtgctcccgaactcctcagcccttgggttgtcgatgggactgggtgccatggaacagggggtggagctcgttggggaggctcgggccgcacaggagcccttggcaggagtgggggagaggctcaggcaaggtgggctgcagttcccgagccctgccccgtggggaggcagctaaggcctggcgagaagtcgagcacagcagctgctggcccaggtgctaagcccctcactgcctggggctggcggggccagctggccgctccaagtgcggggccgccaagcccacgcccacccggaactcgcgctggcccggaagcaccgcgggcagccgcggttcctgcccgctccccgcaagataagggagccggctccggcattggcctgctgagaaaggggctcccacagtgcagcggtgagctgaagggctcctcaagcgcggccagagtgggcaccaaggctgaggaggcaccaagagtgagcgagggctgtgagggctgccagcatgctgtcacctctcactcatgagactgaagctgtgtctcaactgaagcttgactgggaaggatgcacttctgagctcaatctggttagttgtgcattattgttttgactcagttcttagtttctttctgtctttggtcagggcactctctctattctctgtcacacaagcctgtaaaaatgaaagcttaaaacactgaagctcgcttctccagagcaaagtatgcgacagacagagagaaagacaggaaaaaaggaagtaaacaatatcacaagagagagaaagtaagaagcaagtgacaatcttttcataatcaaatattggcagtgacattccctattttccaatgtattctactgccatgaagtgagtcactaaccacttactgtttacatttgggtgtgtatagttggaaataaaaattattatgagccatcatgaaggctgtgcactacgtatgccaaggtgagacaaatgggcctgattctaaatataacgagaaggtactacaatgtgtgttgttgttattgttgttgttctggccaaagaataacaacatctaaattttattcaatttcaatgttttcatggtggagtttgaaaaataaattcaagaggggacatgactttctcaagattcaagttataaaacccaggcatgtttgagagatattcaagcaatgtcccatcccttgtagtttctttctctaagtttatgcagtagctgtgtttaatatcaaacccaacagtcatgcgtatcattttatacatatctcatgagatcccttgcagctggatgccaccataatccccactgtgcaggctgtgagactatggagcccctgagaggcacaatgacatacttggcatcacataattaatacattaaacataaagactttaactcagcttgtatcctcaaacttgtggctctggctgcattccatttcctccggcactggtgcaggaggtgctgtatttgcataattgtgcacaagtaatcagatgacttgggagagaatggtgagcagtcagcagtgcagaaaagcctttgagtaggtcttattgaaggaagataggtcttattgaaagaagaataataccttcaagaagtgacctcatttctttggtgaaaggtcctaacagtactaagtattctggtaaccaaaaactcacattctaaagacagtccaccatgcagcactgttggccagaatctctcaagagagaaagatgttctgctgtataacaactttctgaggctctttcttgtgaggttctgttcctcacaagtagcaccttctagctatgtcttcacacgacagaaggggcatgaatattcctttcaacctccgtcacacgggcactattattttctcgttaacatgcagccctcctgacttaataactttctcaaagttccaataactaatagtatcacactgaatccacgtgtggattaagtttttaaatatgaatgtggagagtgaggaacacaaatatccagaccatagcaaaaagttaataagcaataacaattgcagtggacagtattattaatgcttgggatatgggaatttgatgtttctatcacaaaggttaaacaatggtttatccttggccgggcatgatggctcaagcctgtaatccaagcactttgggatgtcaaggcaggcggatcacaaggtcaggagatcgagaccatcctggctaatacggtgaaaccccgtctctactaaaagtccaaaaacattgctgggtgtggtggcgggcgcctgtagtccccgctactagggaagctgaggcaggaaaaaggtgtgaacccaggaggtggagctttcagtgagctgagatcacaccagtgcactacagcctcggagacacagcaagactccatcaaaaaaataaaattaaattaaaacatataacaaaattaaggtccaattaaaggtaaatatatatagcaaaaaaaaaattcaagctctgataaggttaattgtaacagattgtgccagaattttgagatttctggagatggacagagcccaagagtttccttctataacaatttctgtgaagtttcttacactcttattcaatttgaacgtggataaatgggttttctctgttttgttatttaagagattcatgataaggaaggcctatttatgcatgattcttaaacaattattgagtcagtggtgtctgctgaggaagggcacagaatctcatgcccacagaagcatgatgttctgtcagataggagacttctcccagagccagaacttcatctttcaaatggaattagagattttcacaggcatacattgctctgaagccctatcagaggcttagcactgagaatatgaccaaagaaggtgactaataaacatatgacctagtactctgatctacagtgattctaccctctcaaatagctcttccctggctctggaatcttttctggattcatctaccagaaacagatacactgaaagattgagaagaagcttttattctcactgtgagtcttgccctgtctcaccatcttctctagaagtgcaatgttctaactattcctgagagacttcatctcaggtagctctctctgacaacataattgagaagagaaacgagcaagactcagattattttgaaggcttgtctagggttcttacatgatttatgtctccaatttatgtcaatattgacaaatatagattcatctctagatggtagaaaaacagaaggaggagcctctgctcacagagaaaataaaagatgaattcaatgttttgtagagccagcttattttaaaccatggggcatttaatctttttagaaaaaaacaaaagcaatagggttttttgtttttgtttttgcttttgcttttgtgttttcgttttggtttttttttgtttgtttgttttttccctgaagcaactcaactgtggcctcagacaactgggcactgagaacgcatgctcctcactagaatttcattactacattgcagagaaatgggataattacaaaggatttttttttttttgagatggagtcttcctctgtcatccaagatggagtgcagtggcatcatctcagctcacagcaaccttggtctctcaggttgaagcaattctcctgcctcagcctcccaaatagctgggactacaggcatgtgccaccttgcctgggtaatttttatatttttagtacagactgggttccaccatgttggccagatggtctcgatttcctgacctcgttatccaccctccttggtcacctaaagtgctgggtgtgagctgctgtgcccagcccaaaggattcttaagggtgatatgggggatggaatggaaaaaataaacttagtctttgcacttccacctggtctaactaaccctactctcatcctatcccaaaattattgccagacttttctggagtgtgccaggggcaattcagaaggaaaagaggttattcatgcctatccatttcccatagctcctgagatctaagtcgttcactcccctggtttcaggttgttgctccccttctatatcctcagaattaatgtgatccattccaatacttataattgtacctttatctgatcccctcctattttgctgtagacattttatgtagtagatccagttgtaatagagacaagaatgtttatatacaccataatcagaactaaattggagttccataaccccttttttgactgggctgctactcagaaatcatacaaaccaggctgcctggaggttgcagttaggagaaatcacatcttgcccaggaatgtcagtgtggaaactcagatttggaaaatagattcctatagccccaatcattttgcaacacttctgcagagttaaaagaaagccagtatctaacagaaaatcttgagcttgcagaataacagaaaagaaaaaaaaaacaaaaacacaacttgccaaaacactgaaactccctctacttatgaaataaacaaactggcttaaattggtggaatcattatggccaaatggtgttttggcagaatcaccttgctgaggtcaccgtctgaattttcactgcctgtttcatcacaactccccttcagtttgcccatgacatccatgaggaggcaatgagcttgagagtaacgtttcagtataaaattgctttctcttaaaaacctgatgtcatagtattggcttctagcacttcaagaagtgagctccttttactcaataacaatgttatctatatcttagagacagtcaacaggagataatctcttctgggaccaaagaaggtgactaataaaccatttaatcaacacattacctaaccaaaagctgtggaccctgatgaggaaaataagttaaaatgagactattggctcattttaatagatatggtgataaaagcaaaaaaaaaaaaaaaaaaagagagaatttaagcggtctcaaatacctaaaagatgacatggattagcttcaagtaacacataatgtggctggagtcagctgatctttatgctgaaagtgtcaacagtagtgacaaatacttcaagtaacgggtcaaaagtctaagacagtcattctgccagaaatggtctgggacttccccatacatgggacacgtagatcaactttctccaagaaccaccaacctggcatgcagtgatgacctctgcagtagacagggatttaggcttgattgttgttcatctctttggagacataaccctaattgtgaacttctaaattaatggcctgacaattagatcagcagctaagataaatttcagtttgcagccccaaagaagatgttcttaattagacagttaatcattttcaatatggaagcctaaacacgtagaatgtggcaataacccggaactctcagttctgacaattgagtgaagtaatcaccccagattcaggttcctcattggctgacaatgagatcaaacacccacaccagcccagtgaacaccatgaggtgtcatcttccctggcccattagtgaaccaggaacagatatttagaaaatattcagtaaattggggagtcccacagagtcagaaagtttgcttgagatagtagagggtggcataaaatttctaccgaatatgaattttaatttttactttagtgccgtttctattttagtctaatttccttctagaatatgttatttctatttaccaagtggcctcctgtggtctttttcatagagttcaaatcgacccatctaaaaacagaaagatcaagctaacgacctccctcaggggtcagaattcagtttcacagctctgtagcaagctcattgttgacttacaaattagtgtaaccaatagtaacgtcatggtgaccataactccaacatcccaaaaagtacctcaagttagaggctgacttcatttatcagaggattcaaatggcaaaatcaagctttactagatcactggattactggaagaagtgagcaatgcgaatctgcaatatagtttcactaaactttaataggacagcaagactgtagatattttagccctctcaaaatatgaatcttctgatcctttcatctagaatctctatgtgtgccataaagtcctaactctgcttgtgcctatactttctgttcatgcagagattaaaagacaaacaggtgggagcttagtgttttagcgtttttcctgagaatctgtctagcctagagcatccccatttttttctagattccaaggagtactatcactatcctaattctcagtgtcttgtttccaagtatttcctcctacgattgtcagcgtgactacctttttaccccactgatagtgtttgctccaggtgaactgggtagttcatttttatttaaatgcttccataagcgttaagctattaatttaagatttctttgttttttataaagtaattctgctgtttccctcagagctcaactttcactaagtctcataaattttattatgttttgtctaaatgtctatttatgttaaaatattctctgacactatttgtacattttttattcattaattatttaagattgtgtcatttaatgcacacatgtttgcatttcccaaatttcttgcttttttggtctctaattttctcttttgtgattagaaaacattcattttattatttcaatctttcaattttattgattttttttatgatgcagcatattctccattctagagaatgttctatgtgcatttgggaagaatatacattctgatttggggtgaagagttctccatatatctctagttttatttggtttatgttattcatgtcttctatttccttgtttctcttatgtctagttcttctacccaatagtgtaagtggggaagtgaagcttgcaatttttattgttgaaactattgttgcaactatttctgcctttatttctatcagttttgctttatgtacttctgtgaacttttgttacattcatatatgttaatttattttcctcatgaatttatccttctaattataatctatcttcatctctagtaatagtatttgttgtcttaaagtatatcctaatttttttatttttggtttttctgggtgcatagtaggtgtatacctttatgaagtatatagaatattttgataccgtcatacaatgtgtaataattacatcagagtcaatggggtattcatcacatgaagtattactattggatttcaaataaccaaattatacaatttctgttattttaaaatgtacacttaaattattcttaactagagtcaccttgtgctgtcaaatgctagaactgattcattctttctaactatatttttatacccattaaccattcccacctccccgccctcaaccttctactacttctctcagcctctggagaccatcattctactctttatctccattaattctttggttttaatttttagctttaacaaataagtgagaacgtgtgaagtttgtctttctatacctggcttatttcacttaataaaatgaccttcagtttaacccatgtttttacaaatgacagaatctcattcatttttatgtctgaatagtactacattgtgtatatgtaccacttttttgtttattcatctgtcgataaacacctatgttacttccaaatcttggctattgtgaatagtgttgcagtaaacacaggagtacagctatcacttcaatacacagatttttctctcttttggatatatacctaacagtgaaattgctggattgtacagaagctctatttttagttttctgatgaaccttcaagctgttctccatagtggttccaccaacttacattcccaccaacagcatatgagggttcccttttctccgcatgcttgtcagcatttgttattgccttttagctaaaacccactttaactggggtgaggtaatagctcattgtaattttgatttgcatttctctgatgattcatgatgttgatcatcttttcatatacctatttgccatttgcgtgtctttattggagtaatgtctgtttacatattttgcctattttttaaaataggattattagattttattttctatagagttatttgagcgccttctatgttttggttacaaatccattttcagataggtagtttgaaaatattttctttcattctgtgggttgttttctgactttgttgattcttttctgtgccatgcaaaattttataacttggtgtgataccaattttccattttgctttggttgcctgtgcttgtgaggtgttactcaagaaatctttgcttaatccaaggttttttagaatttccccaatgttttctttcagaagtttcatagtttgcagttttacatttaaatatttaatccattttgatttagtttttgcacatggcaaaagatagaggtctagttttattcctctgcatatggatatccagatttaccatcactgtttattgaagagactgagtttttattcttaatatattttcttggtgcctatgtaaaaaatgagttcactgtagatggatggtttggttctgggttctctattctgctccattttcctgtgtgtctgtttttatgccagtactatgctgttttggttactacacatcggtagtataattttgtgtaatgtaataatgtatgctatgtaatgggattcctccagttttattctttttgctcaggatagctttagctattctaggtcttttgtgattatatataaatttaagattttttagagctgttgtatttatttgtgtgaggaatgtcaatggtatttttacagaaattgcgttgaatctgtagcttgctttgtgtagcatggacattttaatattgattcttccaatccataaacacagaacactgactaatacaatctgcaaatgggtagtttgacttcctctcctcttatttgaatgcctttatttttttctcttgtctgattgctctggccaggattttcaatactatgttgaacagggctggtaagagagggcatctttgtcttgtgccagtttccaagaaaaatgcttccagtttcacccattcagtataaagttggctgtgggtttgtcatagatgacttttattatttcaaagcatgtttcctcaatacctagtatatggagagttttaacataaagtggttttgaattttaatgaaagctctttctgcatctattacaataatcatgaggtttttgtctttcgttctgtttgtattatgaatcacatttattgatttgcatatgttgaaccaaccttgcatcccagggaaaaagcctacttgattgtggtggataggctttttggtgtgctgctggatttggtttgccagtattttatggagaatttttgcatcaatattcatcaaagatatgaaatttttctttcttttgcttttcttccaggttttgatatcagaagggtgctggcctcataggatgagtgaggaagatgatcctcctcaaatttttgggagtttcagtaggaatgataccaaattcttctttgcatatccagtagaatttggctgggaattcgtcttttcctgggctttttaaaattgatagtctatttattacagattcaattttggagcatgttattggtctgttcagggattcaatttcttcctggttcagtcttggaaaggtgtacatgtccaggaatttatctatttgttctaggtgttgtagtttttttgcataaaggtgttcatcatattctccgatgtttatttctatttctgaggagccagtggtaatatcccctttgttgtttctgattgtctttgtttggatcttctctcttttcctctatattagtctagctagtagtccacatttaaaacaaaacctactcctggattcattaatcttttagtttctttgtgtgtgtcctaatctcagtttatctctgattttggttatttctgtcttcttccagctttggggttggatagctcttcattctctagatgttttagttgtgatattgagtggttaaattgagatctttgttactttttgtggtgggtgttcagcaacatcagtttttttctcaacactgatttagttgcatctcagggattctggtaggttgtgtctttgttctcattactttcaaataactttttgattgatgccttaatttcattattcacacaaaagtcattcaggagtgagttatttaatttttatgtaatcatatggtattgagtattggttttctcaacttttacctccaattttactgtactctggtctcggagagtggttgtcataatttgaattcttttataatttctgagaacagttttatgtcgattaagtggttgattttagagtatgtgccatgtggcaatgagaacgtatatgttgttgtttttggtggagagttctgaaagtgtctgttacatccatttgatccagtgctgcattcagatcttgaatatcttgttaattttctgccttaataatctaatattgtcaatgggttgttgaagtttttcactataattgtgtaggaatctaagtctttttaaagacctctaagaacttgctttatgaatttgggtgttcctgtgttgggtgtgtatatatttaaaatgtatatatttaaatatgaatacatatattcttgttgaatttaaccctttagcattttgtaatgcctttttgcctttttaaatctttgttgttttaaagtctgtttgtctaaacttagggttgcaacccattctttctgctgttttccatttgcttggtagatttttatcccgtcattttcagcctatgaaactgattgcatgtgaaatgagtcttgatgacagcatatcattggttctttgttctttatccagtttcccactgtttgccttttaattggaacattcagcccatttacattcatagttagtgttgatatgtgtgcatttgatgctgccattataatggtagctgcttattatgcagacttgtttgtgcgcaactggtctgtatacctcagtgtgtttttttagtggctaataaaggtttttttcacctatatttagttcttccttcaggagctcttgtaaggcatgtcttgtagtaatgaatttcctcagcatttgcctgtttaaaaagaactttatttctcctttacttatgaagcttagtttggccaaatacgagattgttgattggaatttattttcttcaaggaggttaaatattggtattggtctcttctggcttgtaggatttctgctaaaaggcgtacttttacactgataatctttcctttgtggttgacctccctttcctctctagctgcatttgacattttttcttttatttcatgcttgaacaatctgataactatgtgttttggtgattattatattatgaagtatcttactggagttttctgcatttcctaaatttgaatgctggcctctctagccagcattccccaggttggggaagttctcatgaatgatatcctaaaatatgtttttcaaatggcttccattctccccacctgtttcatgaacaccagtgggtcatacctttggtctctttacataatcttatatttttcagaggcttgggggtttttattactcttttttatttctgtctgtatgtcttacttcacataaacagtcttcaaactctgagattcttccttagctttgtctattctactattaatagttgtgaatttcttataaaaaaatttagtgtgatttttttagctctctcaggttagttatgctcttaatactggctcttttgtctctcagctcctgtatcatttcattatgattcttaacgtttttgaattgagtttcaagttacttctgcattttaatgatctttatttctattcatattctgaatttgatttctgtaattttagctatcttggactgatttataaccttactggagaggtactgtgaccatttgaaggaaaagaggaactcaggttttttgagttgtcagaggttttgtgcttgttctttcttatctttctggggtgatatttctttaatatttgaagttgtcaacttttggatttttccttttattctgcttgatgaccttaagggtttaattgtgttataaggttggctcagtcaagtggttttgtgtgtattcatgcaggcgaaggtggctgctcagggctgaggagagtatgctgttttttgtgcttagttgtactcaaatgacagtgttgacaaaggagcagggtgctggtgttgtggggcagatggcctctgtttcccccaagattctgtctgcagtggtggtatagcaggagagggggcctggagtacactcctaccaacagcagtgccagggcagaatgcatatgcacatgtgcactgacaggacagggaaagcaagatccttccatgcacacacacacacacacacacacacaccagcatagtgatgtgtggggtggcaatgggccttggggggaagctgcagtgaggagaggcagcaggcaggctgatgcctggatggggtcaccccactggagctgtctactagtcagacatgatctgccagttcaggatctatgatgcaggcccccagggtactcaaggctgcactgcaagcatgcagggccgaattggggtcgcaggagaggccagcacaccaacgcaagctcaggtcaaaacagccccatctgatgggccaccaccctgcagactttttgtccaaaatttcccctagggctaacgtctcttatgggagcaagttaagcttattggtgtgggcatccctggacatgcttcactacacatgttcccacaataaaccctcttggctgtgcactggctggtgtgctgcccctgtcacttctctaagcagctcttcctttcaactcattttccatgatggtcagagggtctctgccagtgggattccagaggccagtcaggaaagcaggtagctccttgccacttaaactcacctgtttttctcagagtcactgggggccagaaatcagttccactgtgctttagccctgtgcagggttcccagcttctgaatcttaagttcagatgttgtgtctttcctccatcactatcagtacctgccctcggttaagagtgtgccagtcatcctggtcccttggtgtcagctgttccaccttggtttgtctattcagccatcttgctcaaatacacaaagtcttataaatcaataataaatagacaattgactacttgaaaaatgtgcaaggaatttgaattaaaaatttctacagataagaagcaaaatttgtcattaaatttaaaatatgtgacattattagtttagagaaatgcaaatcaaaagctcaatgacatacttactagaagacctgtaaaaggcaataaaaaaggttgccaaagatatcaaaaatatgaaagcctcacacattgtatgtgggagtgtaaaaaacaaccgatttaaagaacaatttggcaattattcaaaatgctataaatagtatcaccatatgactgagacattttactctgttacgtactcaaaagaaatgaaaacctatgactacacaaagaatcagatgtaaatgatcaaaggagcagtatttgtaatagcccaaaggggataaaaccaaaatatccatcaaataataacagaaaaaataacgtgtggtgtgtccatacaataaaatactatgtgccaaacaaagaaaatgaagtaataatacctgctatgtcaggaaaaaacctcaaaatcactaaagtaagtaaaataaaccaaatgcaaaagggcagataatttatgatttcacttaaaataacttttaataaaaggcttatatataaaaacaggctaatgattgcctatgaccagggtaatgaaatcagtaagtacaaaagagattaatttctttttccatagtgataaggtgatttcaaaattagattgtggttatgggtgtctgtaaatacactttaagaacttggaattgtacacttaaaacatgtgatggttttgttataagattatatccctctaaaatgtttccaaatgaaactgttgacttttggagaactaagtcacagactgtaaaaccaaacccatttattgttcatctcaaggcatgttaaataaagaggaaaagacaaagatatagttataacattaaaatcttcatggcaaatagttataagaaaaaaattacaattgtaaaatgtattaatagacataaattacctgcttagatttaccaggccagaaatgtaaattaaataatagtacactattgaagaccactctgagtcactgattattagaaacttgttatgatgtcatcataaggttaaaatattccttatcaaaaatgactcacagcaaaaatgttaaataaagtgtgttagtggcacccctgtccacagttgctggtacttttagtgtatggccaattagaaagctgctcttttgtccctcatttgtaaccaatttcaacactcaaattcaatattgaactcctaaatttattgataaaacatgtgagaagatgtttaaattatatatttaaaagatattatgaaaataaaaaatcttagcaaacatagggagaattataaactaacatttatcatacatacccaccacaaggcttcagcaattctcacattttttatctttcatttttaattatcaacttcaattattctggtaatattttcaagtaagcatattatgttgtcagtttgtagaaatttgagtacctatatctaagaaataaaaagaaaaataaaaatagtactataaaatctaagtaaatacaagtattttctaatattgtactaaagagtttcttgattctttacgtgcaaaacagtagaacttagcaacctccaagactttatgagaaataacaatttaagactaatatttatcctggagactcaaagtgactataaataaatatatctttagttaataaagcttaaaaataaagtattaataaaaacacattttgaagatggctgacacctttgttactagacatggggcttgtgctgtaaataactagtttaaaagtccatggaaaagggattttcaaccaaaaagtctatagaaaacaaaaaattttggtttttctgaactcaggatgtgaggccagcttttaaagcactgaatttaaaaagccctcaagaccctaagcttgataagcacgtcaccagcaggtctcatttttcagctctgtgcaccaggtggcatgtctagcaaaatgtcccctctcatgtcaggttttttctatgaactcagaatgaccactgtcccttagtatgcagccctgcagtggacccaaaaatgacaatcaatcaggtccagagttgctcattatggcctttccagaatgtaattatctaaggacaattctcccccttgtaaaattaagaaagtatcagaatatttgcctaatttttgataacatcatactgtgagccacaaaaaagcaagaatttaaaatgtaagggattatctggatcctagggcacagaaatacacctcaaatagaatagtttcacacacgattttatatgtggacttcctgtgtggaagaaaagaatgtgggggtcaatagtagagaagtctgtatgtagtggaattttaagaaatcagagaggccgatggggttcaggagggtatttattaattatttaggtgcactggtccagtggattaacatccaaagaatgagtcctgaacaaagagttaagttaccttttaagcatttcatgggtggggagagatttgtgcagggagaatcatactacagaagcaagaaacaaagacagttattcaattgagacatgcattacattatttcttacttttcaaggaaaaacctgttttgtgacttgaatttatctgtctagtgaccttgcagcttcacagcttgggaaacagggtcttcacaatccctgggaaaggaggagagataaggatcactagccacagaaaaacaggcagttagtttttaaaggactccagctcttactctttctcaacagaagttgggttttcttacacacaagtgagtttctgcttacacactctttaatctcttataattcctgttccattctccccattggtgctttttataacagaggtgttaatagaaagcaccattatttgccaagtcttcatggagctgagctttttcttcttctggcggtggctgatatctggttaatgcatcaactgtacagactgtacagtagtgttttgggctaccattgcctccatagttgactgaatactcctaataaacagagacaaaaggcaagggaggataaggcagatgcaaagaataagcaagaacctactaatgagggtttagaatttttcaaatgctgagaaccatcctccaaacaaggaatccggggactacctggatcaagtctgaagtggaacctgggccaacttgtgcattctagctgtaatttttatgaccactaatattgatttcttggctattgatttctaggcaacagttggttaaattaaattttctacatattcctccttcggaggataagagataatttaaagccagcctattttgatatatagcatttcctttttgtgttgcttgtattgccaataaatctagtgccctcgatatttcattggttatgatttgaaggactgcctgcaacttcatgatgcggctgaggatatagattatggtgcagtaccctcatgacctgtcttgcacctaggtagctggcccatagcatgtcatgattctttcaggaggtcatttattatctttttagtctcctgtgtccacatcttttttgatatttttgttacttttgtgattatgctttttctagttcttcttttatttttattataaactggatattctaagaatttcccttgctttagaggaattagaaagaaggatggcttgattgcttttaacagacatgtccctgcccattttgctggcagttgccaatatgcccatgctccacagatccaatataggccagagggtgcctttcaagcatttgaatcatctacctgatgccaagtgcagcttagagtaaggaatccagagaaagtgtttggatctggtaagtaggagtcattctgggcatttcttcatagagttttgtttttagtctcgtaataatactgttgccctaggaaggttgtttttcctactgcgtctgtgaaagcctttccccatcgagtgatacagtactttccagttatggagatttttaacaatcaaacactggctgaggctgttggttcactggcagggttaagcaaagtgaagttatcttgtggcattaattcctttgcctcccattgccactcattctccatattagtttctctacatacatagcatgaagaaatttttaagctgccatctgtgttttcagctagttgagcaaataagtttttggttgatgggggaacctcgggcactggctgatcaaaatgcttacagaatgacttggtattgaggggttggatgcatttgagtccttatagtatttttgacaattagtagtggaactccaagacctgctccttgtctatcaactggtaatagtgctgtctgtcctgtagaccaaaaaggtagctctggctttaagatagtaaaatttaaaggatcgcatgtccttgtcttacaatctggtttttaggattatgaacatacgtggcatggcagtcatcaaagaagaaataggccctttttagaagggtgggatttctttggtttgagctataagctttccttctgtttctccctctgatataatatttacctcaaaatagaattaatagggtaagagcccaggctcataacatacatatagctgattatttcctcagtcacagactgaataggtggtctggttgtatatgcatattcctaatttgcttcctgtacattcatagtaggtatggtacagtagagttttaactgtggtattttttatccaggtaatgtgtacacagcatggacatccttcaagagatttatcccctttcagtataagcataaatggtaacaacattgttgtatgtaatagaaacatgcttacactacacatgggcacaaaaactttcctctgggcatagacatttgcagcatttgcagtaataacataacaacggaacaatcagtattgacagaattgtaactatggttataaattgtattcacatttacttatctggacatggtcctcttagcttcggctgtgtgtacactagtcagcttccgggatgtgactagagcagagtttgaagaatccttaagcttcagccatgcttagactgaccagcctccagtgtggtcagagcagggcggttgtcctttttaccggtggctgagatttgccatagggctattcgagtggggcaatctgggtcttgttggctaatccacaggttgtcatcacgactcgctactgtcactggttttagatggctatggtgaatccaaggtgtggcacctgcaactttaacagcagtgggagtagacatgattacaatatggcgcctatcgtatatgggtcctagagtggttgaattccattttttacctaaacgaagtccctaggtttgaaagggtgtactgggtctgttagacttataggcatttttttacatacttaaccatgcattttagtatagccatacttaaagcctgcatttgccttcttaaagttagttttcccaatttacagagattaccctgaatctgatttttctggggggtgggcagctgaacaaaatctcagagggcgaatactcagttttttggtgggggtgcacctgactcataagaggaccatgggcaagacctgatattacttcagatgagtttttcgacaaaatttcttcaacagctgcttgagtgtccagtttatgctctccactttacctgagatctgctacctgtaggctgtatgttatttccattttatttttaatagtcgagttaagtcctgaactattttagccacaaatgttggtccattctctgatcttagagttagaggcagcccaaatctgggaacaatgtctcttaacgccttggtcacgtctagtgccctctctgtcctggtgggaaaggccttgagctatcctgaaaaggtgcaaatgaacaccaatatgtactgatagcccccgtctcagggtcattcagtgaagtccattagcagtttttcacagggcatggctcctttttcctgaactcccatgggccgagtaggatcttgtcgtggattgttccgagtgtaagttaaacacagtttacaaatggcccgagtaatagcaatgagccatggcagataaaaatgatgccttaataatgtctttattttttttttaatctgagttcggtggtggaattgttttacaaatctgggggtcaccatttcaggtatggctagcctcccattgaagaatttgtattatcctctttcaatgtagttcttattttcctggggaagccaagctctgttatttggagtgaagattgggatctccaggaggggaatctccgggaggagaggcatagctaaggcatcttctttaggtggagttgtcattgcagccttctttgcctctttgccttcgtatcttttttagcccttagtgttcttgctttttgctgcctcttgcaggacttcactaccgtcacttttggggcccatacagcgtttaagagctgtaggatttcttccttgtactttatttctttgtttccgcagttaaaagtcttctttttttctttgtaaataaccttatgaacatgcaaagtggcagaagcatatttggaacctgtataaatattggtcttttggtcttttgctagccagagaactcttgtcagagctcttagttctgctttctaatcagaagtttctgtagatgaagactgcacctctactgttgagtctaaagtcaccactgcatacacagcttggcgggctccttttagtatgaaactgcttccatcagtagaatattcaatgtttgggtccctgagggactgatctgtcaaatctctctggcttgagaacacttcatctaccacgtccacaccacaatgaaacggtcctcctggcactgactcgatgagagtaaggtagccggatttagggtattcacagtctctaaagttagtttactagcttcctgcaccagtacggcagtggctgctagtgctttaagacaaggaggccatccaagtgcaacagaatctaattgcctggataaatatgccaccaggcgatgccatgaccttatggcttgagtcagaacccctatggcctccctttcacttgtggacatacaagaagaaaagcttgattagttagatctggcagtcctaaagctggggcctgagtcaaggcttctttgatttctttaaaatccttctcctctttggcctcctagaggaggggctccttttttcctcctcttagtggcttggtatgatggcttgaccatgagcaagaaatttgggttgtaaacgcggcagaaccttgctgctcttagaaactctcttacttgacaccgggtggttggagtagaaagtgcacaaacagcctgctttttttcaggactaagccatctttcctcttggcttatataaaagcttaaatattgacacttttagaggagatttgagcttttttctgacactttttattctgccttctacagcaggtgcagtggttcttgggtttcttctgcgtgtagtagcccttggctggtgtgtgtgtgtgattttttggttctgtttttttgggtttttttggtttgttttttgtttcttttactattgccctgatcattttcattatttctttgacatttatgcttccagtgtctttccttttgcaccatgcacattaatctctctctagcctcggctggccttcacactcctgtccagactagcctttttcatgactacgttcacgcccgcgtccatgcctccttgtaaagccagctcctcttcccggaagggctgctgctagtaagttagcctttcttaagcctgtgatcagccttttcctttgcctcctcatctcggttaattaacaccttggttgtcactttaataagctgagtagcattctcgcctacggagcttgtaacttctgcaatttatgcctgatatctccttgggtctgccttacaagtgctggattcaccctgcactgatttttgagtagcctcagggttaaacggagtgtacaataaaaatgcctcacaaagtctttcatagaacttgctgtgcttttatctgcaccctgaagcatgtctgagatttttaaaaatattgattgcctttttcttttaccatcctttagcctttgcagatgggcttctcggcacctttgtaggtgctgaatctggactgcatcatctgggtcctagtgggggtcctcctgtcctcttaagaggcatgagcatatcttatgcacgaccagacctgagacggcctgcctgattttcgctctcatttcaccttctcgggtgagactggcagcatgtatccatttgaacttaactccttagggacagttaccttggtaaagggggtagattggaatgtaaggaggagcggtctctattcttttctgtggttgttacaaaaccggtttttctgccttttctgagattttttcatttgtcttcagctgctggggcagctgattttactttcacttttggctgggaggtgctacaagcctctgtgtctccttttaactctgtagctgccagagcagctgattttctcttgccgtgagctgcgagcattctacagtaaactgctaggcagggctgcattcatttagccatgagtcaatataaagactaggtctgaatgtcctggctgttctctgaccctagtcaccaccttaaaacacacggccaatttttctatagtgcctttggcaagccatctgacactaaaacagggctattctaattcacagtatgtccttaacttttgaacactcagtttcatcctataatcacttctaactctttttttaaaattctttattatgcttttcaaaggagccacttttgatgttttcactctcatttcctctcttgcagttcactttcactctgactttcactcttgagtccaccagacctggtcctattgcgggagtttcagatgctgcttagccaggaccatgccttcccctgtcgcagactgctgcagctgtaaagctggtactatcagccatatgaagcatcttaggtctgattttccccacattcgcctcagagcacacagccaccactaagggatctgtgcctccccatgtcgctgcccacattggcctctcccaatgtaacaggaagagctgcagacaaaaccccttggacactgagttaaagaaagaaggtgtttattcacctgggagcttcagcaagacttctttcccaagagctgaaccgtccgagtgagcaattcctgtcccttttaagggctcacaactctaagggggtccgcatgagagggtcacgatctattgagcaagcagtgggtatgtgactgggggatgcatacactggtaattagaaaggtactgaacaggacagggatcttcacagtgcattttttatgcaaataaccgattaggtcaggggttgacctttaactaccaggcccagggtgtggcgctgggctgtctgcttgtggatttcatttctgccttctagtttttacttcttctttctttggaggcagaaattgggtataagacaatatgagggttggtctcctcccttattttccccctttgagactctcactcattttattagtgggagttctcaccttcttcctcactacctatgtcttcctctatcacagattgatagtgattcatgtagtacactcgtgctgaagcgttctggtgaactagagttgccatgaaaacttttaccacttgaatgagtacagctagtaagcaagagatcagtaagcaggttcctattactactatagtttccattataagagttttaaatccttctagtgccgggaaccattttcaaacatggcctcagtgtcaaatcggtgccacacctgtactggcacatgtgccagtttcatcatgtctttaactatatcttcgactacttgcccctgatcatctatgtgcagacagcaagtgggcctaattacagtcattaaattgggcctaattacagtcacaatcaatttactaaaataaccagacagcaagacaggtttccaaacattggcaaatgtttcagggagaaaaaaatgccccactagagaagcatggttgtatctctgtgtgtacatacacacggggccaggcagttctatgcatgatagtctgggactgtaaaagtgactatgcaaacctttacattctgtcacagaacttacaatttaaagtgagcatctttttctgtgacttagaaattgactttttttttttagttgggagccacttttagcaattttccctttgttgatacataataatagtatatatttgtggtgcatgagtgatattttgatacatgcatgcaatgtacagtgatcaaatcagggtaattagaatatccatcacctcaaacatggatattattttctttgtgtttgaaaaatttcctttgtgttgggagaatttaaagccatctcttctatctattttaaaatatactaaaaattagtgctaactgtagttatcctactgtgctgtcagacactagaaattattcctcctatgataaaaagtttaggctgtatcccatgggtagtaggacaccacatgactgagtggtcatctgggaaattatctggatgactttggaacattcctggttgagccaggtggctgttgcaacaaactgtggggaagcccctcccctaatgccccctaagccagctgtcactacatggcaggaaacctccaaacctgagggccccaggaaacaatgacagtccccactcacatgcaacttgtgctgtgctcagtgccctccacattgagcctgatctagctttacccgagggctgtgaggtgggacaatcagtatccctttattttaaaaggctcagtgaagttttgggcttaatgtgagtgaagtgatcctaaaagctgactctgggatcccggctccaccactgaccagtcctgcaggtggcgagagttgcctctcctcccctcgatttcattttgtcctctgtgaagtgcagccgtgctgatgactcacatatcagggatacatgggaactgtcaatgaacggagtgctctacacagtgcctggagctcagaatgcagatgagggaggagggtgagccataattctgagggaagtcccaacataatttagcccttccatctagtagccgggccccagtacagagtcctatgtcagtgacagggcaaactgagaccagctcaaacacagcctcttcctcagcagcagggcccaactaaggcacttggtgttttggttcatttcctgcagcttcaatgtaaagaatattgtgagacatttgctggaacaactgaaaatcagaagaagaagagacagctcttctccatctccctgagagctcttccccagaatgtgtttatccagagaggaggggaaatatttatttttcgtaaatagtaaatgctagagtcgaatattatatgaaaatctcattctactacaaaatcggagttgtggttgtggttctttttatttcacttgtgtaagcttaaatgagatacagactctaacatttctccttgaattatgaaatcctaaagagtcggcagcataatgtatgaggaagaagagaaaagcagtcatagtttctggctgccggataagacacccaggtccatttttctcagagcatatgttcattttaatattaacccaaggaaagagtgaagatagatcattcgaacttgcagaattaataatttgaaggtattttcacaaagcatagcgacagtcttggaaatatagatttctttaaaaagcagttgcagagatcaggaggatgaatacctttctatgattttacaaaaaataaatcaacttctgcttcacttgctgaggtttcctctaagcaactattaggacattgttgttttttcttccaactctggagttgcatcaggtctatgtggaaaaaaacattataaaataaaatgaccaaagtcaaaaggagaaggccagggaaagtctattgacaatggatgcagggcagaaaggaagctgcattctcaatcttcttctggtgtcctgtgattgagcctttaccttagatgtaaatcctcccagagttttgtctcttaccttagaatttctattctttttttaagttagtttcttatctagaatgaaagaattgtaatgccactttatggctacacctgggccttattctgtaaatatttttactacctatgaggtaaaattcccagcattagggcaattctttatccaattttttctttctgagacagagtcttgctgtgtcacccaggctggagtacattggtaaaatcttggctcactgcgatctccacctcctgggttcaagagattctgctgcctcaggcttctgtgtagctgagattacaggcacccagcttcatgtccagctaatttttgtacgtttagtatgtttagcaaattttgtatttttagtttcactatgtttgtcaggctggtcttgaactcctgacctccaataatctgcccgccttggccttccaaagtgctggaattacaggtgtgaaccaattctttttgaggaataaattacctaaaggtcctcaagcctttctgtcaggcatatcttggccttttctctctgactggggtccgatgaatcacaggtgggcactatttttctatattcccaaccagtgataatccttgcgctctttatttctaattaaaagaaatccaaaatggagatagttatttgagaggtctctaaagacaactaggaggacatgaggagttgaattaatactcatacacacccaggtggaattttacctgttcgaactgggaaaattacagatgtcctaaaaaggcaactgcatttgacttggattgtttatactgagcctgatcacaaacctcctggagagaaagctgtgctgaattaagctgatgattgcctagatacagtctaagctggcaatcaaacattgtccatcatagactgtgctaaaatctttcacttgtgtaaacttgcagtaaaactttataagtccctccctaacctcatctgaatggaacatgatatagcttcttgctaaatttgtgtctcccaaatagcaatttataaaaaatcatgattaaaatgccttttattttattttccacagggtctgttttactcccatgttataaaatgcttttctcaagaaagcatagagcccattctcttctctagagagaatcgcagccttgcaaaagagacaactaaaaatacatacatataagtatcaagaatttaaaactcaaaatattaaatatgttacaaaagtatataagcaatagaataaataggatgaatagcaaaatggataaaatcaactgtgagttgaaagcctgaaagttcaggtgaaggtgttgaaaatgcttcagaaaaaactaaagagataaatatttataaaaataaagagctgggctcagtggctcacacttgaaatttcagctgctagggatgctgaggccagaggatcaattaaggccagaagtttgagacaagcctaagcaagaccttgtcactgaaaatgttttaaaaattattttgacattatagcatgtaactgtggtctcaactacttagaaggctgaggcaggaggattacttgaactcaggaagttgaggttacagtgaactataatcatgctaccgtactccagcctggagtgaggcaaaatctagtcacattaaaataaaataaaacaaaataaaataaaataaaataaaataaaataaaataaaatataatctagtcacgttaaaataaagtacaattatcaaggacaaaaataaaattgtacaacttggcaatagaaaaaaaatagagcatagagcaactgggggaaagggggttgaaagtataatttcctttttatttccttagttggtcattacttagactttttcacttaattaaaattttcttatactttggtgcccagttaaccccagagcatttttaattaattggtttagaggtagatactcatataagctttccactgcaaattacaagagccaaattttaaataaatgttggacctctaaattttctatttgcaatatttaaggaaataaaaattataaaaaacactttgtaaaacatttagtatgtaactgctgtttctaatgtataataaatccaattatggcagagactcactctgttgttgagaatctctccattatatgactgctgcttgtggtgcttaaacctcaggaagaaagaatatatgaatgtctgaacattgctttaaaaagacaatgtacatttaatgtagagatatgtgaccagcttagaaagctgcactttttccacagcaggcaaaccagagcctggataccccagggtcacagctcatgagaacatagggctggactgtgagaaaacaagaagcaattcgtgcagaggagttgacaagacaccaactgggctgagaaaaaagagctgatagattaatttccaaattatactacaaaacatacaataagcagaccccatagctttatacattaaaaccaaatgatgacaaagagtgaggattgcattaaattaaattaggagcaactaaagactggtttatgatcttgaaactttagtcactctccatagttccatcccatgacccggtaattatttcctgctttctgcatgccttggacactggtccatttctggccccaaagtgttcctttttctaataagagtacttacttcatctcttaatacaattcctttccttgcatactgtgccccaaagaagaaatattaaaaactttcctgatgtttttctgctgcggggttaatgggctcagagtgatgataagaacggccaatgagtgtgtggagccagatagtgcttaaaatatggacttcagtccagtgaagtctaacaagattggcacctgagcactcttctctgagacctgaggatggactcactgaacctggagctactaacgcagctgatacccacatatatacaccacctgtgttcctagaaactggccttcccagcccatcacagcaaacaccaacaccagcatggaacgcttgggagtcagaggtttttcttgtcgttgctactgccatcatccatgccataaccactgtccaggggctcaagaagctgcccacccaccttgctcactgctgacacctgagcaaatcacatgaaggccaaataattagtcttcctggacctgttaacactgctgccagcataactgccttgagacccaaaagcaggcatggtaagctcaccactgccaccactgggatccaatgactaaacctctggtgcccctattcccagcaaaactttaccacagcctctgctaaaaacgataccctaagccactgagaaaggtacagacaccactgatactctttacagccaaagaaatcatataaagacaggccgggtattgtggctcatgcctgtaattccagcactttgggaggccaaggccagtggctcgcttgaggctaagagtatgataccaacctggggaacatgtcaaaaccctgactctactaaaaacacacaaatttgctgggcatagtggtaggcacctgtaatcccagctacttgggagactgaggcacgagaatcgcctgaactcagaggtggagcctacagtgagccgagatagtgccactacactccatcctgggcaacagagcaaggttctatcttaaaatatatacacatacagagtttaaagtctgtgctctcctctcctcagctgccttgtgactgtgtaagtgtatgtttgggaagggagggataggatgaggacaggccagcagagagtcaccagcactggctaaaggtctcagaccaaattttatactcttgaccaggagaaacttctctgttattctaatcacattaaactcaagcattttctttttttctttcttttttttgagaaatcacatcgaacttccaaaattataaagttgaaaatatgtaataattgacaattggaaacaagaaagaggattagctataaaaataactcaggacaatgtatttatcatgaaaagatggtcttggtggaagaaagtttcatgcccagccagcccattcttcaatatctgctaaaaaaaaaaagagcaaagggaacttaaagacatcatagacttggaaatttcgtctcacagtgcattaaattcccaaatcacatgtggaagagaagaagctgctgcatattagactaactagttttactgaatgttgtctgttgatttaaaaattaatactcttatcaagagcaaattgaaatactgaaagttatttactaaacagcaaagaatattttcagtatataaaaagatttaaaaaaacgttgacaccttaactaaatctgacacaaatttaaaaggaaaagtaactagaaaatgaaagaagcgttgtacaagtatgcgatgcaccctctgttgcaccaactgctcctgtttgttgagtcccctcttctattctgcctcctccatctccttgctgattcccctttttgtctattttaatttctctctctattcctttctcaggtcaccatgtcacattccttttgtgtcttttgatgtccaatctcaccgacaccaccttcattctctattttatctttacaaatggttaattaggcataaagagggaaaacactcctgggaagatacctgaatcctggtgcacactatcattatcactgtttttcatgttgatgctcatgtgtctctgctttctcgacagactatttaatcagcagacagatcaacaggccaaaatttccaccatagttgcaaatttgaatgcggatgaatggattaaaacacattcaagtcttgcaatgaacggcataatgtatggtggtataattcagagtggttacaggggagagttaaagatcattgtatacaatatcactcgagaatcttttgctgtaaaactgcagatgtgggttcctcaatttttagtggtaccttgtcaacaattaacccctgaggatgtctctgccccaacagaggctacatacagaactgggagattcagacgcactggtacacgtagcttaaatcctggagccaaaatatgagtacagcgtccatcacatcctactcctatggctggtgaacttgtagctatgggagaagaaactgaaggcatagtacagtttcctaaagatgaaaaacaatattatgttcccctctgttttggttattacagagaataacctgtttactaatggtcagtacctgtgtctctgtgtctgatgccaagaataaattcatcatctgcatagccaccactgcaacagaagccaactgcagtcaatgttggctatgcgtggaattgccagaggccaccaaaaatgggctacgttggagaatcgtccctgtaccttactgcataccgaatgttgtgtgtatatccctgacaattctcacactacgactctccttgcacagccatggtgggtgtggttttcattaactgtgcttttaattctcctgtgcttacactgaatctgtaatctgtataaagtatgctttccccaagtatctgtaagggtattttcctacaattgagtatcaaattgaagccaaatttggaagaaaagttaaatactcaattttatctcaattgaacatggacacaaacaatggtcaccaagtcccggaacaggttctgtgagtttcttcaggcgttcatccaccagtgtctcagagaaatttctattttaatctgttcctgtatgttagttattgaaaaacaacagacaatcgccaaaaatttgacatttttgtggtttttgagcccagtagtgaagagtcctcgttacccggccttatgccaaagaactccttacaaaaagagctagggtcccagatggcactagagcttcctgagacctctccccatctctgcagggatgaggggccaactctgtagcccaggctgttgcttcccggtctgttgatgaatcctccatagtctggtgagtgtagtgtctgactctggagcccaggctattgcttctctgtctggtgatgcttcctccatactctgtagtctgctgtgtgtaaacatatgtatatatatatatatatacatatatatgtatataatttatacatataactgtaaataaaaataattatataattatgtacataattatttaaataaataaatgtaaataaatacatatataattatatatatataatatatatatttatatatataaaaaatatatatattttttcccttctcatatcaatttgcttatcatatcatttacttattatatctgtattgccatataattgagacaaaagatgtttacccttaaaagtattgtgtgtgccttttcttcttcctcatggatctcccatgcagaacacatgcctgacaaatttttatatttttagtggagactgggtttagccatgttggccaggctgatctcaaactcctgacctcaggtgatccttccatctcggcatcccaaagtgctgagattataggcatgaaacacccagccaggaggaggcatttctacaaagaaaacatacaaatggcaaacagacatataaatgttgctaaacatcattaaacctcagagaaatgcaaatcagaactacaataagacattatctcactccagttaaaatgtcttatatcccaaagacagacaataacaagtgctgacgaggatgtggagaaaactttagtgcactcttggtgggaatgtaaattagtataaccactataaaaaagtgtggaggttcctcaaaaagctaaaaattgagctgccacagctacaatgcaacccaacaatcccagtgatgggcattgacacaaaagaaagaaaatcggcttgttgctgcactgtttacaatagctaagatttgaaagcaaactgtctacaaatgaatgaatgtataaaaaaagtagtacatatatacattggagtagtattcagccataaaaatgagattttgtcttttacgacaacgtggataaaagagaagagtatgttaagtgaaataagccaggcacagaaagataaacactgtgcgttctcacttattcgtgggatggaagaattaatacaactgaattcacggacatagagagcagaaggatggttttcagaagctaagaaagacagtggaggctgggggaaaggtggggactgttaatgtgtacaaaaaaatagaataaataagacatattatttgatagcacaacgagatgactctggtcaataataatgtaattgtacattttaaactagctaagaaggaataatcagattttaacccaaagaataaatgcttgagtgggtgggtatcccattctctatgatgtgattattatgcattgcgagaccgcatcaaaacatctcatgaaccccataagtatatacacctacaatgcatcctcaaaaattacaaattaactgaagtaaataaaataaaactatttaaaaataaaatatcataacattaactagccccagaaatataagattttaatgaaataaaaatgcctctataataatcaaacagtgagaagaaagtcacactttactcctatttttgtttctgatctatcttctatctagtttcaagttgtagaattttcttttttcatttctaattaaattttattttattttatttttttattatactttaacttttacggtacatgcgcacaacatgcaggtttgttacatatgtatacatgtgccatgttggtgtgctgcacccagtaactcgccatttaacattaggtatatctccaaatgctatccgtcccccctcaccctaccccacaacaggccccggattgtgatgttccccttcttctgcccatatgttctctttggtcaattcccacctatgagcgagaacatgcggtgtttggtgttttgtgcttggatagtttgctcagaatgatggttccagcttcatccatgtccctataaaggacatgaactcttcattttttatggctgcattttgttccatggtgtatatgtgccacattttcttaatccagtctatcattgttggacatttgggttggttccaagtcttcgctattgtgaacagtgccgcaataaacatacttgtgcttgtgcctttatagcagcatgatttatactcccttgggtgtatacccagtaatgggatggctgggtcaaatagtatttctagttctagagccctgaggaatcgccacactgacttccacaatggttgaactagtttacagtcccaccaaccgtgtaaaagtgtttctatttctccacatcctctccagcacctgttgtttcctgattttttaatgatcgccattctaagtggtgtgagatggtatctcattgtggttttgatttgcatttctctgatggccagtgatgatgagcatttttccatgtgtctttttgctgcataaatgtcttcttttgagaagggtcttcatatccttcacccactttttgatggggttgtttttttcttgtaaatttgtttgagttcgttgtagattctggatattagcccttcgtcagatgagtagatggcacaaactttctcccattctgtaggttgcctgttcagtctgatggtagtttcttttgctgtgcagaagctccttagtttaattagatcccatttgtcaattttggcttttgttgccattgcttttggtgttctagacatgaagtccttccccatgcctatgtcctgaatggtattgcctaggttttcttctagggtttttacggttttaggtctaacatttaagtcttgaatccatcttgaattaatttttgtataaggtgcaaggaagggatccagtttcagctttctacatacggctagccagttttcccagcaccatttattaactagggaatcatttccccatttcttgtgtttgtcaggtttgtcaaagatcagatggttgtagatatgtggcattatttctcagggctctgttctgttccattggtctatatctctgttttggtacaagtacaatgctgttttggtcactgtagccttgtagtatagtttgatgtcaggtagcgtgatggctccagctttgttcttttggtttaggattgacttggcaatgagggctcttttttagttccttatgaactttaaagtagttttttccaattctgtgaagaaagtctttggtagcttgatggggatggcattgaatctataaattaccttgggcagtatggccattttcacgatattgattattcctacccatgagcatggaatgttcttccatttgtttgtatcctcttttatttcattgagcagtggtttgtagttctccttgaagaggtccttcacgtccttgtaagttgggttcctaggtattttattctctttgaagcaattgtgaatgggagttcactcacgatttggctctctgtttgtctgttattggtgtataagaatgctaatgatttttgcacactgattttgtatcctgagactttgctgaagttgcctatcagcttaaggagattttgggctgagatgatggggttttctagatatacaatcatgtcatctgcaaacagggacaatttgacttcctcttttcctaattgaataccctttatttccttctccttcctgattgccctggccagaatttccagcattatgttgaataggagtggtgagagagggcatccctgtcttgtgcctgttttcaaagggaatgcttccagcttttgcccatttagtatgatattggctatggctttgtcagagatagctcctattactttgagatacgtctcatcaattcctaatttattgagagttttttgcaggaagagttgttgaattttgtcaaaggccttttctgcatctcttgatatctcaagataatcacatggtttttttgtcattggttctgtttataaggtggattacgtttgttgatttgtgtatgttgaaccagccttgcatcccagagatgaagcccacttgatcatggtggataagctttttgatatgctgctggattcggtttgccagtattttattgaggatttttgcatagatcttcatcggagatattggtctaaaattctctttttttgttgtgtctctgccaggctttggtatcaggatgatgctgtcctcataaaatgagttagggaggttccctctttttccattgattggaatagtttcagaaggaatggtaccagctcctccttgtacctctggtagattttggctgtgaatccatctggtcctggactttttctggttggaaagctaattattaattattgcctcaatttcagagcctgttattggtctattcagagattcaaattcttcctggtttagtcttgggtgggtgtatgtgtcgaggaatttatccatttcttctagattttctagtttatttgcatagaggtgtttatagtattctctgatggtagtttgtatttctgtgggatcggtggtgatatccccttgggtttaataaacagataacatcaaacattcaactaatccaataaaaagaaattttattcatttgagaatgtgttttccagagcatacttatatattacgttttaacttcataatttatattttataaaaacataactaattcaagttaatcttctctaatttttaattcaattgaatttttatcaggatcactatatttaaacaaaaattacctgaatttttcacatcataatttatagattctgcttctacaaattgtctgtagggaccattatttctacacggtctactttcctgggttaagtggtggatacccaaatgttttttggaataatgttttcttatatcagtttttagtcagtgatacgttgcaccatgtttaattttaagcattatcagttttcttttttttttttaattgatcattcttgggtgtttctcgcagagggggatttggcagggtcacaggacaatagtggagggaaggtcagcagataaacaagtgaacaaaggtctctggttttcctaggcagaggaccctgtggccttccgcagtgtttgtgtccctgggtacttgagattagggagtggtgatgactcttaaggagcatgctgccttcaagcatctgtttaacaaagcacatcttgcaccgcccttaatccattcaaccctgagtggatacagcccatgtttcagagagcacagggttgggggtaaggtcacagatcaacaggatcccaaggcagaagaatttttcttagtacagaacaaaatgaaaagtctcccatgtctacctctttctacacagacacggcaaccatccgatttctcaatcttttccccacctttcccccctttctattccacaaaaccgccattgtcatcatggcccattctcaatgagctgttgggtacacctcccagacggggtggtggcagggcagaggggctcctcacttcccagtaggggtggctgggcagaggcgcccttcacctcccggacggggcggctggccaggctgggggctgacccccccacctccctcctggacagggcggctggccgggcgaggggctgaccccctcacctccctcccggatggggcggctggccgggcggggggctgaccccccacctccctcccggacggggcggctgactgggcggggggctgacccccccacttccctcccggatggggtggctggccgggcagaggggctcctcagttcccagtaggggtggccgggcagaggcacccctcacctcccggacggggcggctggccgggcggggggctgacccgcccacctctctcccccccagaaggggtggctggccgggcggggggctgaccccccacctccctcccagacggggcggctggccgggcagagaggctcctcacttcccatcaggggctgccaggcagaggcacccctcacttcccggatggggcggctggccgggtggggggctaacccacccacctccctcccggaggaggcggctggccgggcgggcggctgaccccccacctcccttccggatggggtggctggccaggcggggggctgacccccccacctcactcccgaacgaggtggctgccgggcggagacgctcctcacttccgagacggggtgactgccgggcggaggggctcctcacttctcagacggggtggttgccaggcagagggtctcctcacttctcagacggggcggccgggcagagacattcctcacatcccggacggggcggcagggcagaggtgctccccacatctcagatgatgggcggccgggcagagacgctcctcacttcccagatgtgatggcggccgggaagaggcgctcgtcacttcctagatgggatggcggccgggcagagacgctcctcactttccagactgggcagccaggcagaggggctcctcacatcccagacgatgggcggccaggtggagacgctcctcacttcccagacggggtggcggccgggcagaggctgcaatctcggcactttgggaggccaaggcaggctgctgggaggtggaggttgtagcgagccaagatcacgccactgcactccagcctgggcaccattgagcactgagtgaacgagtctccgtctgcaatcccggcatctcgggaggccgaggctggcggatcactcgcggttaggagctcagcccggccaacacagcgaaaccccgtctccaccaaaaaaatacgaaaaccagtcaggcgtggcggcgcgcgcctgcaatcgcaggcactcggcaggctgaggcaggagaatcaggcagggaggttgcagtgagccgagatggcagcagtaccatccagcttcggctcggcatcagagggagaccgtggaaagagagggagagagagaccgtggggagatggagagggtgagggagagggagagggagagggagagctatcagttttctttcttgtgcattattttcacagtaatataaattatggacatcaaaatatcctcagggttaaaaacgttggagtccaagcattctatattcttgatttgtatggtttcacttatgactcagcattttaggaaaacattggctctataatctgtcaccctcaccccatttaaataaaaacatacttttttggacacaaggatcaggcatacacatctacacagtggatcacatcatttttgggggcaaactgaaaactgtttttatactcaaacatactgttgggaaactgtgaaataaaaatttctgatgtttgttaaaaattgggaagaaagacattaatactattgtagtagattttatggccatcgtaatagggttcagttcagaaattgatcataactctgaacacagacaacgaagaatttatagtcaataagcagaataaatcagtggataaaaattattgaaaaacatttgataaaataccaaaggaggaagaggaactttttatagcagaaggctggttacaggttggctaaggacttaaatatcaaagaaagggaatcacgatattagtagacataagggatatgtggatttttactaaacagtattagcaggatttatgaaagtgagcctctcaaaccaggagcagggcaagaagtcaaggttggcttagtcaaaaagagggttcagttaagcttgactaacatttggtcataaagggagtgcttacaagaacccagatttttttcccatctgatctgaaaataaataatcaccaaaaaaggctttgtttgaaaaatgagtgcccacttcacctgagaaaacctccatcttcttctgtttacctttgaatttagtgtagaaaaagagcacttgtcatcgccacagttttaattttgctttcactcttaaaaacagagagtcagggctgggtgtggttgttcatgcctgtaatcccagcattttgggcatggtgatgcaagcacacctgtaatcccagctacttgaaaggctgaggcaggagaatcacttgaacccaagagtcagaggtttcagtgagccaaaatcacaccactgcactccagcctggtgacagagtgagactccatcaaacaaaacaaaacaaaacaaaacaaaacaaaacaaaacacaaaattagaaatttagttttattcaaacagcaacttacaaacacaaaggttatagtttctgacccctattcaagacaattggttgtaaccataagtattgatgggacttcagggagattcctcagatggagctgatgcagctgtgcaagccactttgaccttgcatctttcctacttcttagcctttgaaatggacatggttgctggtgcaggcttgtgctcctacagccagccatatgggaccatgagacagcctacaggataaaaaccatctactgaaatattgtagcaaagtgtgccaagagggttgactagaagtagctatggtgtgtggctttcatgaaaagaaacaaagagggaaaataaatacagcaccatcaactgaaacacccagatatttgcagtgggactaatgaaggaaacagctcaacccatgggaaaaagaagggcatggcaaccgcccacccgggagtaacacagaccaaagggaacctaccctgcccaaggaagtggtgagcaaatacgtgaccctgagaaaccacacttctcccatggatctttgcaactctcggatcaggagattttctcgtaaacttattccaccagggcctttggtctgatacacagagctgcgtgttcccggcagaacaactgctcagacacaaacagaatcgcaggagctttacatattttggctctgagatctctggcaaaggtgactgcaactcagacaaggtgggaggttggatctccgtaaatgcccctagaaaggaagctgaatccatgggcctgagcagcatcagtgggccccacttccatgacgcctcacaggataagatcaactggcttggaattccatccagcccccagcaacagcattgcaattacctgggatggaacaacgttcctggaggcaggggctggctgctatatttgctgtttggatgactcagccattccagcctggaggtttaggagagttaaaaaaaaaaaaaactcatggcagatggaagaaatcccttagcacggcacattggccctcccaaagtttggccggactacttcttgaagtgggacccagatacctttttcatctcagagtggggcctcctaccagagcctccagacagccccttccatattctccggcaggcagagttttgatttattcctggatgcagtgcacattgggagcagtgggtcttcatatttgttgtttggagaactcagccataacaatcagtgggcttaggagagtccaaaccatcccagggaagaaggaatcccccagcatagcacagtggatctgccataatgtgatcagattgcttctttaagtgggacctaatatgctctgcatctctgggtggaacttcccaaccagggcctccagcaactcccactgatgttgtctggctggcagaggtttaaaaacttcctgggccagagttcctagagagaggggttggccaccatctttgctgtttcagccactttgctgtttcagcctccaggctttggagagcccaatctgatgaagggcagaaatggtaccccgcacagcatggctgatctatgaaagtggggctagatggcttaagtgggtccccaatcctattcctcctagctgggtgagacctaccaactggggtttccagtcacctcctacaggtgtgttcgagccctcaacatgtctgcacccgccctgggatggagctcccagggaagggagtgggctgctatctttcttgtttcacagccttcactggtgatacccccagatactggaaaatccgaggtgacaagagagtggagcagatgcccaacaaactacagcagccccacacaaaatggccaaacagttaaaaggaagagaaacaaacaaaaatctcattcaaaggccagcaacctcaaagattaaagatagataggcacacaaaggtgagaatcacaacaagaatactaaaaactcaaaaatcagggtgctctccctctcccaaatgaccacactacttctccagcaagagttcagaataagggtgaggctgtgatccctgaaataacagaagtagaccccagaatgtggataaaaatgaacttcactgatctaaaggagcatgctctaactcaatacaagaaagctaaaaattacaatataatattgcaggagctgacaaacaaattagccaggatagagaggagcctaaccaacccgatagcactgtaaaacacaatacaaaaatttcataatgcaatcacaagtattaatgaggaaagaaactcagagcttgaagtttgtatttctgaaagaagacatgcagagaagaatagaaaaaaagaatgaaaggaataaacaaaacctttgagaaatatgggattatgtaaagagaccaaatctacaactgattggtgtacttgaaagagctggggagaatggaaccaatcaggaaaacatatttcaggatatcatcaatgagaacttccccaaccttgctacactggccaacaattcagaaaatggagagaagttcagtaagatactccaagaaaaaatcatacccaagacacataaacgtcagattccccaaacttgaaatggaagaaaaaaaaagaaaaaaaagctcagccgcagagaaaagccaagtcacctacaaaaagaagttgatcagactaagagcagagctgtcagtgagaaccctacaagccaaaagagattgggggccaatatttaacgttcttaaagaaaataaactttaagccagaattttatatctggccaaactaagcttaatctggggagaaataacatccctttcagacaagcaaattccgagttaattcatgaacaccagacatgcttttcaagagctcctgaaggaagcaccaatttggaaagggaaaattattcccagccaccacaaaaacacactcaagtacacagaccattgacactataaatcaaccacataaacaagtctgaaaaataaaaataaccagctagcatcaagataacaagataaaatctacgcataacaatacttaccttaaatgtaaatgggataaatgccccagttgaaacacacagggtggcaattgtataaaaaccaagacccattggtatgctcttcaagacacccatctcacatgcggggacacacataggctaaaaataaagggatggaggaaatttcaccaagcaagtggaaaacctaaaaaagcaagggttgcagtcttactttccaacaaaacagactttaaagcaacacagattaaaaacaacaacaacaacaacaacaaagagggtcattacataacggcaaataattcaattcaacaagaattaactattctaaatatatatgcacccaacacaagagtacccagattcatataacaagtttctagatatcttgaaagagacttagaacaccacacaataatagtgaccgactttaacatcccactgacagtattagaaagattattgagacagaaaattaacaaagatgttcaggacctgaacttagctctggatcaaatggacatgatatatatttacagaactctccacatgaaaacagcagaatatacattcttctcatcactacatgacactttctctgaaattggtcacttagccagaagtaaaacactcttcagcaaatgcaaaagaactgaaatcataataaacagtggctcagatcacagcacaatcaaattaaaactcacgatgaaataatttactgaaaaccataaaattaaatggaaattgaatcacctgctcctgaataacttttgggtaaataatgaaattaaggcagatatcaaggagttctttgaaaccaatgagaacaaagacaaaacataccagaatctctgggacacagctaaggcagtattaagatgaaaatttatggcattaaatgcccacattaaaatgccagaaatgtctcaagttacaacttcacaacaaaaataactacaggaacaagagcaaagaagttctagagctagcagaagacaagaaataaccaaaatcagacctgaactgatggagatagggacaagagaaaccattcaacagatcaacaaattcaggagctgtttctttttctttgaaaaaaccaataatataaatacaccagtagtagactaataaggaagaaaatatcaaaaattaaaatgaacacaatcagaaataataagggttaccactgaccccacagaaataaaaataaccatcagaaaatatcataaacacctctatgcctataagataacaaattcagtagaaatggataaatttctggacacatacacccttcaagaataaaccaggaagaaattgaatccctgaaaagacaaacaacaggctctgaaattcaggcagtaataaatagcctacaaaccacaaaaagatcagaaacacaaagattaaaagctgaaggttatgacatttatgaagaagaactggtacaattcccactaaaattatttcaaaaaactgaaacagagggcttccttcccgactctttctatgagagcacatcatcctggtaccaaaacctggcagacacacaagaaaaaaaacaaaacttcaaaaaatttgcaagaagaaaacaaccccatcaaaaagtgggcgaaggacatgaacagacgcttctcaaaagaagacatttatgcacccaaaaaacacatgaaaaaatgctcaccatcactggccatcagagaaatgcaaatcaaaaccacaatgagataccatctcacaccagttagaatggcaatcattaaaaagtcaggaaacaacaggtgctggaggagatgtggagaaataggaacacttttacactgttggtgggactgtaaactagttcaaccattgtggaagtcagtgtggcaattcgtcagggatctagaactagaaataccatttgacccagccatcccatttctgggtatatacacaaaggactataaatcatgctgctttaaagacacaggcacacgtttgtttattgcggcactattcacaatagcaaagacttggaaccaacccaaatgtccaacaatgatagactggattaagaaaatgtggcacatatacaccatggaatactatgcagccataaaaaatgatgagttcatgtcctttgtagggacacggattaaattggaaatcatcattctcagtaaactatcacaagaacaaaaaaaccaaacaccgcatgttctcactcataggtgggaattgaacaatgagatcacatggacacaggaaggggaacatcacactctggggactgttgtgatgaggggggaggggagaaggatagcattgggagatatacctaatgctaaatgtcgagttaatgggtgcagcacacaagcatggtgcatgcgtacatatgtaactaacctgcacattgtgcacatgtaccctaaaacttaaagtataataataataaaataaaaaaagaaaaaaaaaaacttcatgccaatatttttgatgaacatttatgcaaacattcttaacaaaataggggcaaaccaaatccagcagcgcatcagaaagcttatccaccacaatcaagtaggctccatctgtgggatgcaactttaattcaacgtacacaaatcaatatgtgatttatcacataaacagaactaaagacaaaagccacatgattgtctgaatagatgcagataaatctttgcatccataaaattcaacatccattcttgtaaaaactctcaataaactaggtattgaaaaaaacatacttcaatataataagaaccatgtatgacaaacccacagccaatatcatactgaaagggcaaaagctgaaagcattcccttttaaaacgggcacaagacaaggatgccctctctcatgaatcctatttcagatagtattggaagtactgggcagagcaatcaggtaagagaaaaaggcattcaaattgaaagaaaagaaattaaacaacacctgatgtcagacgacatgattctatatcttgaaaacccctattgtctcaaccccaaagcttcttaagctgataaatatctttaacaaagtcccaagatacaaaataaatgggccaaaatcactagcactaaatccttatataccaacaacagtcaagccaagagcaaaatcgtgaatgaacactcattcacagttaccacaaaaagaataaaataccaaggaatgtatctaacaagagaagtgaaaggccactacaaggagaactataaaccacttctcaaagaaatcagacatgacataaacaaatagaaaaacatttcatgcttatggatagaaagagttaatattgttaaagtagacacactccacaaagaaatttatagagttaatagtatttccgttaaactaccaatgacatttttcacaaaactagaaaagctattttaaaatttatatggaaccaacaaaggcctgaatagtcaagacaaccccaaacaaaaagaactaagctggaggcatcacactacccaacttcaaactgtgctacagggctacagaaaccaaaacagcatggtactggtacaagaacagacacacagaccaatgaaacagaatagaggacccagaaataagactgcacacctacaactaactgatcttcgacaaacctgacaaaaacaagcaatgaaaaaacgactctgtactcaataaatggtgctgggataactgcctagccatgtgcaaaaaattgaaactgaaccccttcctccatcatcctctgcaactaacacaggaacagaaaactaaccaccgcatattctcactcataagtgggagttgaacaataagaacacatggacactggaagggaaacaacacaactggggctagtcagggaatgggagtcgaagggagggagagcattaggataactagctaatacatgtgggacttgaagcctggataacgggctgataggtgcagtaaaccaccatggcacacatataccaatgtaacaaacctacacattctgcacttgtacttcagaacccaatttaaatttaaaaaataaagaaagattccttacatcatatacaacaataaactcaacatggtttaaatgtaaaacccaagactataaaaactttggaagacaacctaggcaataccattcaggacataggcatgggcaaatattttatgatgaaggcgcaaaagcaattagaacaaagagaacattgacaaatgggatctaattaaactaaagagcttttgcacagcaaaagaaactatcaacagagtaaacagacaatgtatagaatgggagaaaatttttgcaaactgtgcatctgacaataatctaatttctagcatccataaggaacataaatttacacgagaaaaacaaacaaccttattaaaaattggccaaaggacacacagaaacacttcttgaaagaagacatacatgcagccaataagcgtatgaaacagaagttcaacatcagtgaccattagagaaatgtaaatccaaaccacaatgagatatcattttataccaggtataatggttaccatgaaaaaatcaaaaaatcacagatgctgacaaagttgtggagaaaaagcaacatttttaccctgttggtcgagttcaaacgttgtggaagacagtgtggtgattcttcaaagacctaaagaaaagaataccatttgacctagcaatctcattactgggtatatacccaaacaaatataagtcattctattataaagatacctgcacgcacaagttcatcacagccctattcacaatagcaaagacatcaaatcagcctacatgttcatcaataatagactggttgaagaaaacgtagttcatatacaacatggagtactatgcagccataaaaaagcacaagattatgtcctttgtagggacatggatggagctggaggccattatccttaaaaaactaacagaaacagaaaaccaaataccacattttctcacttataagtggagggtagatgatgagaacacacagaaacatggaggggagcaacacgcaccagggcctatcaggaggtagggggtgagaggagggagagaatcagaaaaaataactaatagttagtagacttaatacctgggtgataaaacaatctgcacaaccaaacttcgggacggtatgtttccatatttaaagaacctgcacatcctgcccatatacccctgaacttaaaacaaagttcaaaaaagaaaaacattttagcaaaatgacagactatttttgactaccttcgtgtacagttcagagtcagactgcccagctctaacatccttatttatgagaaagaaagcattctctctcttatctgcactattatattgggttttcttttttaatttttttgagacggagtttcactcttattgcccagactggagtgcaatggcgcgatctcggttcaccacaatctctacctcccgggttcaagcgattctcctgcctcagcctctcaagaagcagggattacaggcatgcaccactacgcctggaaaattttgtatttttggtagagactgggtttctctatgttggtcaggctggtcttaaactccagacctctggtgatccgtctgcctcaacctcccaatgtgttgggataacaggcgtgaactacagcacccggtctgggttttcttctatatgtaggaaaatgtaatcctaactaaagtgctagctttgccatggaatctctgtgtaattctggatgttatgtcactttcctaagacttttttctatctgcatagtggtggaggcagtagtggggaagatttaattatacaaagggtccatcaatccatgtgttaagtgaggatgtcactactttccagactcagaggacaggggacatattgttatgctccatggaagctgtttgggggtggaggtggggctcacttgcacacattgtctgtgggccttgaaagatcaagtgtgtatgacccttcttgaacagaaggtccatgtgcccagtgcagaacccatctatttcttcccaagtgaggaagatctgggaacaccctgatcacagccttgctacaccaatcctagttggtagggacgttagaccatatgcatgttgagctgtggcttaagcattttgacatctcacatctcattggatatctgaaaaactgaggtctggagagaagcagggactggcccagagatgatgaagtgggcagagtccaagggaaaaaagagcattctgacctcctaggccagggctcaacactctcatggggtttgttttgggaatgagtccctgagatcctggggatttttgccaattttctcgtcatatgaagcaaactcatgtctgcatcatagaattccacaggtttgtgcatacacacacagacttctcaggctaaaggtcataagaggagttaacgctgatggagtgatgagaagaaaaaagatagaggataggggcagctttgtcatggggtagaagcaccccatcttctggtaacatgcccaggacccataacatgggcaggggaaggcaataggctgatggcttgagaggctcaaggcttccatggatctgactgggctgcagccaacaccaggatagctttccaaggacaaaaccttactttctccattcattaatctgcataattaaaatggtaaggaatccccctacacccaatatggagaggaatacagtagtgaaaaccttcaatttttccctgtacaaattgacataattgaactgtgtgacccctaaatttgaaaggcttaaagaagtgagttgaccttgctgtctatcaattaccactgtactctcagaactttggaaattgctctgtgtcctccgaaggtctttcagagcagaaagtggcctaggggtgtgcgggactgagcactcaggctggtgtagaatgtgacagatcctcagaccactgctctgggatccaaggagaagaccttctcggtcagagctttggggatcttttttttggagggggcgatcttttttgaaagtggagacagaatcgttttccagggctccctcatttgccctcctgtttcatagtatttcttttttctgtctttctttctttctttctttctttctttctttcttctttctttctttcttctttctttttctttctttcttctttctttctttccttctttttctttctctttctttctttctccttcgtttcttttctttcttcctttctttcttctttctctttcttttgttcttccttcattccttccttccgtttctttctttcttctttctttctttcctcttccttcattccttccttccttttctttctttctttctttctttctctttctttctccttccttcctccctccctttcttttctttctttccttattttcttttttctttcttctttctttctttcttctttctttctttctttctttctttctttctttctttatcagagtctctctcttctcgctctttcacgggactggagtggagtggcatgatctcggctcactgcaacctccacctcccgggttcaagtgattcactgcaacctccacctcccaggttcaagtgattctcctgcctcagcctcctgagtagctgggaatataagggcgtgccaccaagcctggctaatttttgtattattagtagagacggggtttcgccatgttgtccaggatggtctcgatctcttcacctcgtgatctgcttgtatcagcctctgaaaaaaactgagattataggtgtgagccaccacacaaagcctacagtttatttttctttgcttgttaaaatgttttagtcagctaaaatttacacaatatagagttctacatactatctaatataaagtgtaaaattcagtgcttttcagtttatttacaatgctatgcaactgtcacccttatcaaattccaaaatagtttcatcaccctctcaccaaaaaaactccatatccattaagcagtaatttatcattcatccaccgaatttccttggtaaccactgattgactttctatctctagtactctctttctttctttccttttttttttttttttttggtgtctcactctgtcacccatgctagagtgcagtggcacgatctcggctcgctgcaagctccacctccctggttcacgccattctcctgcctcagcctccagggtagctgggactacagatgcctgtcagcacgcccagctatttttctttgtatttttagtagagacagggtttcaccatgttagccagcatggtctcgatctcctgacgtcgtgatctgcctgcttcggccacccaaagtgctgggattacaggcgtgagccatcacacccggcttctatttctagttttctattctagtcactttatagaaatataataatataatatgtgaccttttttctttggcttttctctttgagcgtgttttcattatttatccatgttgtggcacatatcagttctgtatttatttttatggctagctaatactccattgtataaataatattctattggccagggacgatggctcacacctataaactcagtattttgggaggctgaggctggtggatcacctgaggtcaggagttctagaccagcctggctgacatggtgaaacactgtgtctactaaaaatacaaaaattagccgggcgtggttcctgaaagcccaattgctcaggaggctgaggccagggaatctcttgaacccaggaggtggaggttacagtgagctgagatcgtgccactgcactccagcatgggtgacagagcaagactgtctcaaaaaaaaagaaagaaaatgagaggaaatatgtgcaaactacacagctgacaagcgattgataagcagaatacagaataaacaaaaaactaaataaaaaattagtttaactttaaaatgggcaataatcttcagaaacatttctggaaaatgtaaggggcataaacatagaacctaaaagttagagaagaattatgaaaaaactgaaggatatagaaaaaataatttcagactattcacattaaaatttaattagagagggggtggagccaagatgggcgaataggaaaagccttagtctagaactcccagcatcggcaatgcagaacacaggtgatttctgcatttccaactgaggtaccgggctcatctcactggggagtgtcagaaagtgggtgcaggacagtgggtgcagcgcaccccatgtgagccaaagcatggtgaggcatcgcctcacccaggaagtgcaaggggtcagggaataccctttcctagtcaaagaaaggggtgacagattgcacctggaaaatcgggtgactcccaccctaacactgtactgttccaaaggtcttagcaaacggcataccaggagattatatcctgcacctggctcagagggtcctacgcccacagagccacaatcattgctagcacagcagtctgagatcaaactgcaaggcaacaacaagcctgggggaggggcgcccaccattgccgtggcttgagtaggtaaacaaagcagccaggaagctccaactgggtggagccaactgcatctcaaggaggcctgcctgactctgtagactccacctctgggggcagggaatagccaaacaaatggcagcagaatcctctgcagacttaaatgtccctgtctgacagctttgaagagagtagtggttatcccagcatgcaactggagatctgagaacagacagactgcctcctcaagtgggtccctgacccccgagtagcctatctgggaagcatccccagtaggggcagactgacacctcacacggccgggtactcctctgagacaaaatttccagaggaacaatcaggcagcaatatttgcttttcaccaatatccgctgttctgcagcctccactgctgatacccaggcaaacagggtctggagtggacctccagcaaactccaacagacctgcagctgagggttctgactgttagaaggaaaactaacaaacagaaagtacatccacaacaaaatcccatctgtacatcacaatcatcaaagaccaaaggagagaaaactacaaagatggggaaaaaacagagcagaaaaacggaaaattctaaaaatcagagtatctctccacctccaaaggaacacagctcctcaccagcaatggaacaaagctggacagagaatgactttgacgaattgagagaagaaggcttcagacgatcaaactactccgagctaaaggaggaagttcaaacccatggcaaagaagtgaaaaacctttaaaaaaattagatgaatagctaactagaataaccaatgcagagaagttcgtaaaggacctgatggagctgaaaaccaatgtacgagaagtacgtgatgaatgcacaagcctcagtagccaattcgatgaactggaagaaagggtgtcagtgatggaagatcaaatgaatgaaatgaagtgagaaaagaagtttagagagaaaaagataaaaagaaatgaacaaaacctccaagaaatatgggactgtgtgaaaagaccaaatctacatctgattggtgtacctgaaagttatgaggagaatggaaacaagttggaaaacactctgaaggatattatccatgagaacttccccaatctagcaagggagggtgacattcaaattcaggaaatacagagaacaccaaaaagataatcctcaagaagagcaactccaagacacataattgtcagattcaccaaagttgaaatgaaggaaaaaatgttaagggcagccagagagaaaggtcgggttacccacaaagggaagcccatcagactaacagctgatctctcggcagaaactctacaagccagaagagtggggaacaatattcaacattcttaaagaaaagaattttcaatccagaatttcatattcattcaaactaagcttcataagtgaaggagaaataaaatcctttacatacaagcaaacgatgagagattttgtcaccaccaggcctgccctaaaagagctcctgaaggaagcactaaacatggaaaggaacaaccggtaccagccactgcaaaaacatgccaagttgtaaagaccatcgaggctaggaagaaactgcatcaactaacgagcaaaataaccagctaacatcataatgacaggatcaaatgcacacaaaacaatattaaccttaaaagtaaatggactaaattctcccattaaaagacacagactggcaaattggataaagagtcaagacccatcagtgttctgtattcaggaaacgcatctcacgtgcagagacacacataggctcaaaataaagggatggaggaagatctaccaagcaaatggaaaacagaaaaaggcaggggttacaatcctagtgtctgataaaacagactttaaaacaataaagatcaaaagagacaaagaagtccattacgtaatgataaagggatcaatgcaataagaagagctaattatcctgaatatatatgcacccaatataggagcacacagattcataaagcaagtccttagagacctagaaagagacttagactcccacacaatagtaatgggagattttaacaccccactgtcaacattagacatatcaatgagacagatagttaacaaggatatccaggaattgaactcagctctgcaccaagcagacctaatagacatctacagaactgtccaccccaaatcaacagaatatacattcttctcagcaccgcaccgcacttattccaaaattgaccacatagttggaagtaaagcactcctcagcaaattgtaaaagaacagaaattataaaaacctctctctcagaccacactgcaataaaactagaactcaggattaagaaactcactcaaaaccgctcaactacatggaaaccaaacaacctgctcccgaatgactactgggtacataacgaaacgaaggcagaaataaagatgttctttgaaagcaacgagaacaaagacacaacataccagaatctatgggacacattcaaagcagcgtgtagagggaaatttatagcactaaaggcccacaagagaaagcagagaagatctaaaattgacaccctatcatcacaattaaaagaactagagaagcaagagcaaacacattcaaaagctagcagaaggcaagaaataactaagatcagagcagaattgaaagaaatagaaacataaaaaacccttcaaaaaatcagtgaattcaggagctggtttttgaaacgatcaacaaaattgatagactgctagcaagactagtaaagaagaaaagagagaagaatcaaatagacgcaataaaaactgatcatttatgtggctcaagttctctaatataacatagtacggtcaaaatggaagggtaaaaattgcaagaccaccttaacgtttgtcatcttaagtgtactataaaaatgccttttaaattaattcagtgaataggtttttaagtgcatgttttagattatgctgaactgtcaaataccagcacatccctaatttgcagtagattaacagcactttttagcacacatcacagagttgttcggtggccaaattgaaaaggcacctcctctccatgtggtcattcagaaactcaaagttctttcattatttgtcttcatcatccatgagtcgtggttgccgtttgtgttcagtcccctgaaaataaagtactttaagaaatgcatgcgagaagacttgatggactcatcttaatgtgactcacatccatctcactctacaaccattaacaataactggtcacgtttccacatctcatgcaaatgaggctaagaaatgtaattctgctgtgtccctaataaatgggagaatagaatttgttgaatgaccagagttttccgtaacattgtgtcactcatatggatttactgtgtttctcaaatatttattaaacatctgtcatagccaagcactgtgataaggagtacagggaggacagagagctgactcagcagagtcctagtctgaaagaaactcacaatctaagaaaataagaaaagtcatgttaggtgctgctataaaggcacatgcacacgtatgtttattgtggcactactcacaatgcaaatacttggaaccaaccgaaatgtccaacaatgatagactggatcaagcaaatgtggcccatatacaccatggaatgctatgcagccataaaaaatgatgagttcatgtcctttgtgtgtacatggatgaagctggaaaagataattctcagcaaactatcacaaggacaaaaaaaaacaaacaccacatgttctcgcttataggtgggaattgaacaatgagaacacttggacacaggaagggtaacattacccactggggaatgttgttggggggggaggggggagggatagcatttggagatatacctaatgtaaatgacgagttaatgggtgcagctcaccaacatggcacatgtatacataagtaacaaacctgcacgttgtgcacatgtaccctagaacttaaagtataataaatatatgtataacatacgtatatattatatacatgttcaagggattctcctgcctcagcctcccaagtagctgggattacaagcgctgccattactcccagctattttttgtatttttagtagagaaggagttttgccatgttgaccaggacggtctggatctcctgacctcatgatccacaccccttggcctcccagagtgctgggattacaggtgtgagccacagcccccggcctatatgagttttcaaatagttttttctagctccgtaaaaaatttcattggcagtttgatggaaatagtattaaatctgtaaatttctttgtgaagtatagccattttagtgatattgcatcttcctatccgtgagcatgggatggttttccatttgtttgtatcttctctgatttctttgagcagtgttttgtaaatctcattgtagagctctttcacctccctggtgagctgcatttccagatattttattattttagtggcaattgtgaatgggatggcctttctgattttgctgtcagtgtggctatcgttggtgtagaaaaatgttagtgatctttgcacattgatttagtatcttgaaactttgctgaagctgtttgttaactaaagaagctttgtagatgaaactacagggttttctagatagagaattatgttatctgcaaacagaaatagtttggctttctctcttcctatttggatgttcttcggatttctttctctagcctgattgctctggtcagtactgtcaatactaagttgaatagaaatggcaagagagggcattcttgccttctactggttttaaaaaataatgttcccggcttttgcccattcaacacattgttggctgtgggtttcttatagacggcttttattattttctgcgtctattgagataatcatcttttttttgtttttagttctgtttatgtaatgtattacatttattgatttgcacatgatggaccaaccttgcgtcctaaggaggaagcctacttgatcatgacggattacctgtttgatgtgctgctggatttgcctcccaaatattttgttgagaacttttgtattgatgttcgtcaagaatgttggcctgaagttttctttcccttctttctttttttttttttttttgacggtgtctccctctgttgcccaggctggagtggattgcactggcgcgatctctgcttaatgcaatctctgcctcctgagttcacgccattctcctgcttcagcctcccaagtagctgggactacaggtgtctgctaccaagcccggctaattttttgtgtttttgttgtgtctctgcctgttttggtgtcaagatcatgctgtcctcatagaatgagttggggagaagaccctccttctcaatttttgggtatagtttctgtaggaattgtaccagctcttctttgtacatttggtagaatttggctgtaagtccataaagtccagagcttttttttttgattggcaagctacttattacctatttaatatcagagttttttactggtctgttcaggaaatcattgtcttcctggcttaatcttgagagagtgtgtatatctaggaatctatttatttcgttaaagttttctagtttgtgtgtataaagttgttcatgttagtgctgtccccagttaaataaaaacaactattagaaaccactaaagtttaacacttgtttttatatctttaatcaatttttatttaatttttctacttggaatgtgataaagattcaactttactggtttaaatgtggacttgttttcccagcatttcttgtgtaacaaactgtctttacataatgattaagacacacttttaaaaagacaaacaataatttatgaaagggttttttggagtatctattttatttatttgatctccacaattgttcttatgccactatcaaactgttataattttagtagctttttatgttttcaaatttaaaattgtgagccacctaattttgtccttcttttcaagattattctgtacattcagaggatgttcaaattccatatgaagttttaaatgagctattttctttttgcagaagaaaagttggaaaaatgaaaacttgggattacagtacatctgtacactcctttgggcagtggtattgtcatcttaacttcattaaatcttccggttcaggaacatggaatttgttgccagttatttaagtcctttttagtttttttcataaacattctgatcctgtattttttattgtacaagatatttacctccttattaaatttattgctaagaattatattattttaatgttgttgcgaacaattgttttcttaatttactgtcaaattgttaattgtatatggaaatgcagtttatgtttctgtgttgtaaaaataattatttcatgtctcaaatctagattagcaattcattcagaataaatatgctgtatatattactagtcatttaactttttccaataagctaaccaatttcaatatgtctaaatatgtaaaaatgttaaattgtgttagatttttcacttactctcacctgtcatttatctgtcagaattacattactgcgcactagaactttcatttctggggccgggcacggaggctcatgcctatattcctagcactttgtgaggccaaggcaggcggaccacctgagatcaggagttcgagacctgtctggccaatatggtaaaaccccgcctctactaaaaatacaaaaataagctgagcgtggtcttgggagactgtattcccagctactttggaggctgacactggagaatcacttgaacaatcccacgacacaaaacaaccgaggttagtcttcatgtcgaaagtcttcaatggattgtcttttatcacaggattgcttagtgcaacatttaatgggaaagatgcatgctactgagatgtagttctccacaagtctcttagagtttgttgttttgttgtggattacatcacatacctgtcctgttccacgttatttttcaaagatttttgtacacaaataacctggaaaaagggtagtagtttttctcttcaggtgaatggcagataaattactcaatcaatataataaagacaatttttctttgtgacgcaaaggttggacaggcttccatgtaacctactttaaaaagattgaggtttcttagtcttgagtctgctcagctatgacacaaatcttccccatgtacaatgtccatatgagccttttgaaatccttcaaaaaacgtagtatggacaaggagaactaatacaaatatgaggcttttgcctccaggtaagcagtaaatagtaggtattttttttcatacttcagtgtctcatgccttctaccagcatcgatgaaaatggaaggttaatatgttgtttacaaatgctataaaatcttagatacgtcacaattatttaattttggagatgactatggcatgctgagataaacacaactttctgaaaggggaaaaggaacaaatacttgaagagcttgcaagggatatgagaagttcccccaggaccaacagcaaattctctcggccaagtggttagtttggtgaagcaagagatcaagactctgctgtctgctaatgagactgatccttgagaggattataacaatgaacctgagagctttgcatgttcacttttctcctgctggaaaatcaaggagctcttaaagctaatgttgaggtttggatgagtccaaaacagtagaagttcatgtggttcagctgtgagcagcaaaaagactgcaaaaagccacattaagcaggttttgtaagtctctcctttacccacatgaaggaacccattccctctgcacttctaatttttgtcctttgtctacagctaacttcagcaactttaaatattaaactacatacgattggaggtttggatgggggaacacaaatgtatgtagttcctttggatatatgtatctaattcaccattctgtggagtcccttagggtgcacagggagatataggtgttagggtggctggaaatgctgacaaacctatcattctattaatccagttgcttccagataatggaaagcatggtaagtccactgacatccgtgaagatgagcacactgctacactttggctgtgaagtgagtttcttggtctgagcaatgctaagtggaatatcatagggatggatgagggattctgtgagtccatggagggtagttttggcagaattccacccagggaaagcaaatttgtatccatagtaagagcctactccagtgagtacaaactgttgccgcctatattataaaagttattcaacgtaataaatttactaccaggtgcctggtggatcaccctggaaatgatgtcatatcaaagactcagtgtagatctgtgctgctgtcaaattaaacattcagaattgactgtagccagactggcctttgggattcaaagttcatattgcttagcccgtgcattgcttctatttctgctactatgttcaccttgtttataagcccattgggtgatgatgggggtgacagggaagtaagaatgacccatactcacggaacaagacattctgtccacatcattatcaaaatcatgctctgatacggttaccccttagtagggattcatatagaacagacatatctttatgtaatttacccagtgagagaagtttatccacaaaagtttttctattttttttttttgccaggaattttgtaatcatgttccttccgtgtcattggtcatgtagccaattcatgggccacagcagtgttgcaggagtgagtatcataggatctcaaactcctgttcttaagcaatccttgcctcaacctcttaagtagctgagactataggtgcaccccacaacgcctaactaattttgttttatttttagtagagattagattttgctatgttttccaggctgttctcacactccccacctcaagcgattctcccagctttgcctgcaaagtgctttgactagagtcaaacctccacacccagcacctataatttgatattttaaacaatactatgtagcgaaagcaattacgaagttatctagggaaagaaagctcactatcacagtgtaaaattgtatagatatgatgcgggcatgtgtgtatacatgcttgcttgtgtgcataggtgcgtgttttctgagaaatggtaccttattgctaccaggctaggatagcattcatgttcttctgaagatgtcaaatattgaagctccaggattcatagaacaagattcctaagtggttcacgagagggtgaacgattgagtaatgggtattttggaagaaacaactggcctagggacaagaataagtgtgcaaatcatctgtgtgaaacacgctttcttcggagcacgcatttcatgcacttcattctactgtgacagatattgctactctgagtttgggagagattgaacctagggtctactgtgaaactctgtagactagacttctgtctgaggcagcccctgcctgtaaccgtaacctgcgccaaactccaatggagcattcttctcaatggataaatggaaattccggatgatccgatgggcagagagtgcgactgtttttttcaggagctctggttgaatggttttggggactttctgggaggatgctctgcacccagaaaagtagtccaacgggaatcatgagaaaatgggcgactccgtgtgcctccgtcccctcctacttcctcacccacccctccatcagggatcccacgtattccaggatgacacgtgttttagttgtctttgggcgacaactagcggcaaccgttattgaaaatgtaagctgtagagaacaaaaaaactctggtcgcctgttcacagctcactcactgcaacgttgaatcctgggcttaagcaatcctcctgcctcagcttcctgagtagctggaaatataggcatgtgccacaatgctgggcaatatttttaagtagtggtaatctctctcgatgtgttgcccaggttagtctcaaactcctgtcctctatccagcctcccaccttggtcttcagaagtcctgggattacaggcttgagccactgtgctcactcctataatttgatgttttcaacaatactatgtagtgaaatgcatcacgaagacattttgcaaaagaaagctcactatcacatataaagttgtatacttgtcatgtgcttacgtgagcgcatgttcttgcctgtctgaatgttttctgagaactgatcatcttttccccagggacactggttgaagagctgcggggattgtctgggagggtgtctcgggcccggaaacgtaatccaggagagatcnnnnnnnnnnnnnnnnnnnnnnnnnnnnnnnnnnnnnnnnnnnnnnnnnnnnnnnnnnnnnnnnnnnnnnnnnnnnnnnnnnnnnnnnnnnnnnnnnnnnnnnnnnnnnnnnnnnnnnnnnnnnnnnnnnnnnnnnnnnnnnnnnnnnnnnnnnnnnnnnnnnnnnnnnnnnnnnnnnnnnnnnnnnnnnnnnnnnnnnnnnnnnnnnnnnnnnnnnnnnnnnnnnnnnnnnnnnnnnnnnnnnnnnnnnnnnnnnnnnnnnnnnnnnnnnnnnnnnnnnnnnnnnnnnnnnnnnnnnnnnnnnnnnnnnnnnnnnnnnnnnnnnnnnnnnnnnnnnnnnnnnnnnnnnnnnnnnnnnnnnnnnnnnnnnnnnnnnnnnnnnnnnnnnnnnnnnnnnnnnnnnnnnnnnnnnnnnnnnnnnnnnnnnnnnnnnnnnnnnnnnnnnnnnnnnnnnnnnnnnnnnnnnnnnnnnnnnnnnnnnnnnnnnnnnnnnnnnnnnnnnnnnnnnnnnnnnnnnnnnnnnnnnnnnnnnnnnnnnnnnnnnnnnnnnnnnnnnnnnnnnnnnnnnnnnnnnnnnnnnnnnnnnnnnnnnnnnnnnnnnnnnnnnnnnnnnnnnnnnnnnnnnnnnnnnnnnnnnnnnnnnnnnnnnnnnnnnnnnnnnnnnnnnnnnnnnnnnnnnnnnnnnnnnnnnnnnnnnnnnnnnnnnnnnnnnnnnnnnnnnnnnnnnnnnnnnnnnnnnnnnnnnnnnnnnnnnnnnnnnnnnnnnnnnnnnnnnnnnnnnnnnnnnnnnnnnnnnnnnnnnnnnnnnnnnnnnnnnnnnnnnnnnnnnnnnnnnnnnnnnnnnnnnnnnnnnnnnnnnnnnnnnnnnnnnnnnnnnnnnnnnnnnnnnnnnnnnnnnnnnnnnnnnnnnnnnnnnnnnnnnnnnnnnnnnnnnnnnnnnnnnnnnnnnnnnnnnnnnnnnnnnnnnnnnnnnnnnnnnnnnnnnnnnnnnnnnnnnnnnnnnnnnnnnnnnnnnnnnnnnnnnnnnnnnnnnnnnnnnnnnnnnnnnnnnnnnnnnnnnnnnnnnnnnnnnnnnnnnnnnnnnnnnnnnnnnnnnnnnnnnnnnnnnnnnnnnnnnnnnnnnnnnnnnnnnnnnnnnnnnnnnnnnnnnnnnnnnnnnnnnnnnnnnnnnnnnnnnnnnnnnnnnnnnnnnnnnnnnnnnnnnnnnnnnnnnnnnnnnnnnnnnnnnnnnnnnnnnnnnnnnnnnnnnnnnnnnnnnnnnnnnnnnnnnnnnnnnnnnnnnnnnnnnnnnnnnnnnnnnnnnnnnnnnnnnnnnnnnnnnnnnnnnnnnnnnnnnnnnnnnnnnnnnnnnnnnnnnnnnnnnnnnnnnnnnnnnnnnnnnnnnnnnnnnnnnnnnnnnnnnnnnnnnnnnnnnnnnnnnnnnnnnnnnnnnnnnnnnnnnnnnnnnnnnnnnnnnnnnnnnnnnnnnnnnnnnnnnnnnnnnnnnnnnnnnnnnnnnnnnnnnnnnnnnnnnnnnnnnnnnnnnnnnnnnnnnnnnnnnnnnnnnnnnnnnnnnnnnnnnnnnnnnnnnnnnnnnnnnnnnnnnnnnnnnnnnnnnnnnnnnnnnnnnnnnnnnnnnnnnnnnnnnnnnnnnnnnnnnnnnnnnnnnnnnnnnnnnnnnnnnnnnnnnnnnnnnnnnnnnnnnnnnnnnnnnnnnnnnnnnnnnnnnnnnnnnnnnnnnnnnnnnnnnnnnnnnnnnnnnnnnnnnnnnnnnnnnnnnnnnnnnnnnnnnnnnnnnnnnnnnnnnnnnnnnnnnnnnnnnnnnnnnnnnnnnnnnnnnnnnnnnnnnnnnnnnnnnnnnnnnnnnnnnnnnnnnnnnnnnnnnnnnnnnnnnnnnnnnnnnnnnnnnnnnnnnnnnnnnnnnnnnnnnnnnnnnnnnnnnnnnnnnnnnnnnnnnnnnnnnnnnnnnnnnnnnnnnnnnnnnnnnnnnnnnnnnnnnnnnnnnnnnnnnnnnnnnnnnnnnnnnnnnnnnnnnnnnnnnnnnnnnnnnnnnnnnnnnnnnnnnnnnnnnnnnnnnnnnnnnnnnnnnnnnnnnnnnnnnnnnnnnnnnnnnnnnnnnnnnnnnnnnnnnnnnnnnnnnnnnnnnnnnnnnnnnnnnnnnnnnnnnnnnnnnnnnnnnnnnnnnnnnnnnnnnnnnnnnnnnnnnnnnnnnnnnnnnnnnnnnnnnnnnnnnnnnnnnnnnnnnnnnnnnnnnnnnnnnnnnnnnnnnnnnnnnnnnnnnnnnnnnnnnnnnnnnnnnnnnnnnnnnnnnnnnnnnnnnnnnnnnnnnnnnnnnnnnnnnnnnnnnnnnnnnnnnnnnnnnnnnnnnnnnnnnnnnnnnnnnnnnnnnnnnnnnnnnnnnnnnnnnnnnnnnnnnnnnnnnnnnnnnnnnnnnnnnnnnnnnnnnnnnnnnnnnnnnnnnnnnnnnnnnnnnnnnnnnnnnnnnnnnnnnnnnnnnnnnnnnnnnnnnnnnnnnnnnnnnnnnnnnnnnnnnnnnnnnnnnnnnnnnnnnnnnnnnnnnnnnnnnnnnnnnnnnnnnnnnnnnnnnnnnnnnnnnnnnnnnnnnnnnnnnnnnnnnnnnnnnnnnnnnnnnnnnnnnnnnnnnnnnnnnnnnnnnnnnnnnnnnnnnnnnnnnnnnnnnnnnnnnnnnnnnnnnnnnnnnnnnnnnnnnnnnnnnnnnnnnnnnnnnnnnnnnnnnnnnnnnnnnnnnnnnnnnnnnnnnnnnnnnnnnnnnnnnnnnnnnnnnnnnnnnnnnnnnnnnnnnnnnnnnnnnnnnnnnnnnnnnnnnnnnnnnnnnnnnnnnnnnnnnnnnnnnnnnnnnnnnnnnnnnnnnnnnnnnnnnnnnnnnnnnnnnnnnnnnnnnnnnnnnnnnnnnnnnnnnnnnnnnnnnnnnnnnnnnnnnnnnnnnnnnnnnnnnnnnnnnnnnnnnnnnnnnnnnnnnnnnnnnnnnnnnnnnnnnnnnnnnnnnnnnnnnnnnnnnnnnnnnnnnnnnnnnnnnnnnnnnnnnnnnnnnnnnnnnnnnnnnnnnnnnnnnnnnnnnnnnnnnnnnnnnnnnnnnnnnnnnnnnnnnnnnnnnnnnnnnnnnnnnnnnnnnnnnnnnnnnnnnnnnnnnnnnnnnnnnnnnnnnnnnnnnnnnnnnnnnnnnnnnnnnnnnnnnnnnnnnnnnnnnnnnnnnnnnnnnnnnnnnnnnnnnnnnnnnnnnnnnnnnnnnnnnnnnnnnnnnnnnnnnnnnnnnnnnnnnnnnnnnnnnnnnnnnnnnnnnnnnnnnnnnnnnnnnnnnnnnnnnnnnnnnnnnnnnnnnnnnnnnnnnnnnnnnnnnnnnnnnnnnnnnnnnnnnnnnnnnnnnnnnnnnnnnnnnnnnnnnnnnnnnnnnnnnnnnnnnnnnnnnnnnnnnnnnnnnnnnnnnnnnnnnnnnnnnnnnnnnnnnnnnnnnnnnnnnnnnnnnnnnnnnnnnnnnnnnnnnnnnnnnnnnnnnnnnnnnnnnnnnnnnnnnnnnnnnnnnnnnnnnnnnnnnnnnnnnnnnnnnnnnnnnnnnnnnnnnnnnnnnnnnnnnnnnnnnnnnnnnnnnnnnnnnnnnnnnnnnnnnnnnnnnnnnnnnnnnnnnnnnnnnnnnnnnnnnnnnnnnnnnnnnnnnnnnnnnnnnnnnnnnnnnnnnnnnnnnnnnnnnnnnnnnnnnnnnnnnnnnnnnnnnnnnnnnnnnnnnnnnnnnnnnnnnnnnnnnnnnnnnnnnnnnnnnnnnnnnnnnnnnnnnnnnnnnnnnnnnnnnnnnnnnnnnnnnnnnnnnnnnnnnnnnnnnnnnnnnnnnnnnnnnnnnnnnnnnnnnnnnnnnnnnnnnnnnnnnnnnnnnnnnnnnnnnnnnnnnnnnnnnnnnnnnnnnnnnnnnnnnnnnnnnnnnnnnnnnnnnnnnnnnnnnnnnnnnnnnnnnnnnnnnnnnnnnnnnnnnnnnnnnnnnnnnnnnnnnnnnnnnnnnnnnnnnnnnnnnnnnnnnnnnnnnnnnnnnnnnnnnnnnnnnnnnnnnnnnnnnnnnnnnnnnnnnnnnnnnnnnnnnnnnnnnnnnnnnnnnnnnnnnnnnnnnnnnnnnnnnnnnnnnnnnnnnnnnnnnnnnnnnnnnnnnnnnnnnnnnnnnnnnnnnnnnnnnnnnnnnnnnnnnnnnnnnnnnnnnnnnnnnnnnnnnnnnnnnnnnnnnnnnnnnnnnnnnnnnnnnnnnnnnnnnnnnnnnnnnnnnnnnnnnnnnnnnnnnnnnnnnnnnnnnnnnnnnnnnnnnnnnnnnnnnnnnnnnnnnnnnnnnnnnnnnnnnnnnnnnnnnnnnnnnnnnnnnnnnnnnnnnnnnnnnnnnnnnnnnnnnnnnnnnnnnnnnnnnnnnnnnnnnnnnnnnnnnnnnnnnnnnnnnnnnnnnnnnnnnnnnnnnnnnnnnnnnnnnnnnnnnnnnnnnnnnnnnnnnnnnnnnnnnnnnnnnnnnnnnnnnnnnnnnnnnnnnnnnnnnnnnnnnnnnnnnnnnnnnnnnnnnnnnnnnnnnnnnnnnnnnnnnnnnnnnnnnnnnnnnnnnnnnnnnnnnnnnnnnnnnnnnnnnnnnnnnnnnnnnnnnnnnnnnnnnnnnnnnnnnnnnnnnnnnnnnnnnnnnnnnnnnnnnnnnnnnnnnnnnnnnnnnnnnnnnnnnnnnnnnnnnnnnnnnnnnnnnnnnnnnnnnnnnnnnnnnnnnnnnnnnnnnnnnnnnnnnnnnnnnnnnnnnnnnnnnnnnnnnnnnnnnnnnnnnnnnnnnnnnnnnnnnnnnnnnnnnnnnnnnnnnnnnnnnnnnnnnnnnnnnnnnnnnnnnnnnnnnnnnnnnnnnnnnnnnnnnnnnnnnnnnnnnnnnnnnnnnnnnnnnnnnnnnnnnnnnnnnnnnnnnnnnnnnnnnnnnnnnnnnnnnnnnnnnnnnnnnnnnnnnnnnnnnnnnnnnnnnnnnnnnnnnnnnnnnnnnnnnnnnnnnnnnnnnnnnnnnnnnnnnnnnnnnnnnnnnnnnnnnnnnnnnnnnnnnnnnnnnnnnnnnnnnnnnnnnnnnnnnnnnnnnnnnnnnnnnnnnnnnnnnnnnnnnnnnnnnnnnnnnnnnnnnnnnnnnnnnnnnnnnnnnnnnnnnnnnnnnnnnnnnnnnnnnnnnnnnnnnnnnnnnnnnnnnnnnnnnnnnnnnnnnnnnnnnnnnnnnnnnnnnnnnnnnnnnnnnnnnnnnnnnnnnnnnnnnnnnnnnnnnnnnnnnnnnnnnnnnnnnnnnnnnnnnnnnnnnnnnnnnnnnnnnnnnnnnnnnnnnnnnnnnnnnnnnnnnnnnnnnnnnnnnnnnnnnnnnnnnnnnnnnnnnnnnnnnnnnnnnnnnnnnnnnnnnnnnnnnnnnnnnnnnnnnnnnnnnnnnnnnnnnnnnnnnnnnnnnnnnnnnnnnnnnnnnnnnnnnnnnnnnnnnnnnnnnnnnnnnnnnnnnnnnnnnnnnnnnnnnnnnnnnnnnnnnnnnnnnnnnnnnnnnnnnnnnnnnnnnnnnnnnnnnnnnnnnnnnnnnnnnnnnnnnnnnnnnnnnnnnnnnnnnnnnnnnnnnnnnnnnnnnnnnnnnnnnnnnnnnnnnnnnnnnnnnnnnnnnnnnnnnnnnnnnnnnnnnnnnnnnnnnnnnnnnnnnnnnnnnnnnnnnnnnnnnnnnnnnnnnnnnnnnnnnnnnnnnnnnnnnnnnnnnnnnnnnnnnnnnnnnnnnnnnnnnnnnnnnnnnnnnnnnnnnnnnnnnnnnnnnnnnnnnnnnnnnnnnnnnnnnnnnnnnnnnnnnnnnnnnnnnnnnnnnnnnnnnnnnnnnnnnnnnnnnnnnnnnnnnnnnnnnnnnnnnnnnnnnnnnnnnnnnnnnnnnnnnnnnnnnnnnnnnnnnnnnnnnnnnnnnnnnnnnnnnnnnnnnnnnnnnnnnnnnnnnnnnnnnnnnnnnnnnnnnnnnnnnnnnnnnnnnnnnnnnnnnnnnnnnnnnnnnnnnnnnnnnnnnnnnnnnnnnnnnnnnnnnnnnnnnnnnnnnnnnnnnnnnnnnnnnnnnnnnnnnnnnnnnnnnnnnnnnnnnnnnnnnnnnnnnnnnnnnnnnnnnnnnnnnnnnnnnnnnnnnnnnnnnnnnnnnnnnnnnnnnnnnnnnnnnnnnnnnnnnnnnnnnnnnnnnnnnnnnnnnnnnnnnnnnnnnnnnnnnnnnnnnnnnnnnnnnnnnnnnnnnnnnnnnnnnnnnnnnnnnnnnnnnnnnnnnnnnnnnnnnnnnnnnnnnnnnnnnnnnnnnnnnnnnnnnnnnnnnnnnnnnnnnnnnnnnnnnnnnnnnnnnnnnnnnnnnnnnnnnnnnnnnnnnnnnnnnnnnnnnnnnnnnnnnnnnnnnnnnnnnnnnnnnnnnnnnnnnnnnnnnnnnnnnnnnnnnnnnnnnnnnnnnnnnnnnnnnnnnnnnnnnnnnnnnnnnnnnnnnnnnnnnnnnnnnnnnnnnnnnnnnnnnnnnnnnnnnnnnnnnnnnnnnnnnnnnnnnnnnnnnnnnnnnnnnnnnnnnnnnnnnnnnnnnnnnnnnnnnnnnnnnnnnnnnnnnnnnnnnnnnnnnnnnnnnnnnnnnnnnnnnnnnnnnnnnnnnnnnnnnnnnnnnnnnnnnnnnnnnnnnnnnnnnnnnnnnnnnnnnnnnnnnnnnnnnnnnnnnnnnnnnnnnnnnnnnnnnnnnnnnnnnnnnnnnnnnnnnnnnnnnnnnnnnnnnnnnnnnnnnnnnnnnnnnnnnnnnnnnnnnnnnnnnnnnnnnnnnnnnnnnnnnnnnnnnnnnnnnnnnnnnnnnnnnnnnnnnnnnnnnnnnnnnnnnnnnnnnnnnnnnnnnnnnnnnnnnnnnnnnnnnnnnnnnnnnnnnnnnnnnnnnnnnnnnnnnnnnnnnnnnnnnnnnnnnnnnnnnnnnnnnnnnnnnnnnnnnnnnnnnnnnnnnnnnnnnnnnnnnnnnnnnnnnnnnnnnnnnnnnnnnnnnnnnnnnnnnnnnnnnnnnnnnnnnnnnnnnnnnnnnnnnnnnnnnnnnnnnnnnnnnnnnnnnnnnnnnnnnnnnnnnnnnnnnnnnnnnnnnnnnnnnnnnnnnnnnnnnnnnnnnnnnnnnnnnnnnnnnnnnnnnnnnnnnnnnnnnnnnnnnnnnnnnnnnnnnnnnnnnnnnnnnnnnnnnnnnnnnnnnnnnnnnnnnnnnnnnnnnnnnnnnnnnnnnnnnnnnnnnnnnnnnnnnnnnnnnnnnnnnnnnnnnnnnnnnnnnnnnnnnnnnnnnnnnnnnnnnnnnnnnnnnnnnnnnnnnnnnnnnnnnnnnnnnnnnnnnnnnnnnnnnnnnnnnnnnnnnnnnnnnnnnnnnnnnnnnnnnnnnnnnnnnnnnnnnnnnnnnnnnnnnnnnnnnnnnnnnnnnnnnnnnnnnnnnnnnnnnnnnnnnnnnnnnnnnnnnnnnnnnnnnnnnnnnnnnnnnnnnnnnnnnnnnnnnnnnnnnnnnnnnnnnnnnnnnnnnnnnnnnnnnnnnnnnnnnnnnnnnnnnnnnnnnnnnnnnnnnnnnnnnnnnnnnnnnnnnnnnnnnnnnnnnnnnnnnnnnnnnnnnnnnnnnnnnnnnnnnnnnnnnnnnnnnnnnnnnnnnnnnnnnnnnnnnnnnnnnnnnnnnnnnnnnnnnnnnnnnnnnnnnnnnnnnnnnnnnnnnnnnnnnnnnnnnnnnnnnnnnnnnnnnnnnnnnnnnnnnnnnnnnnnnnnnnnnnnnnnnnnnnnnnnnnnnnnnnnnnnnnnnnnnnnnnnnnnnnnnnnnnnnnnnnnnnnnnnnnnnnnnnnnnnnnnnnnnnnnnnnnnnnnnnnnnnnnnnnnnnnnnnnnnnnnnnnnnnnnnnnnnnnnnnnnnnnnnnnnnnnnnnnnnnnnnnnnnnnnnnnnnnnnnnnnnnnnnnnnnnnnnnnnnnnnnnnnnnnnnnnnnnnnnnnnnnnnnnnnnnnnnnnnnnnnnnnnnnnnnnnnnnnnnnnnnnnnnnnnnnnnnnnnnnnnnnnnnnnnnnnnnnnnnnnnnnnnnnnnnnnnnnnnnnnnnnnnnnnnnnnnnnnnnnnnnnnnnnnnnnnnnnnnnnnnnnnnnnnnnnnnnnnnnnnnnnnnnnnnnnnnnnnnnnnnnnnnnnnnnnnnnnnnnnnnnnnnnnnnnnnnnnnnnnnnnnnnnnnnnnnnnnnnnnnnnnnnnnnnnnnnnnnnnnnnnnnnnnnnnnnnnnnnnnnnnnnnnnnnnnnnnnnnnnnnnnnnnnnnnnnnnnnnnnnnnnnnnnnnnnnnnnnnnnnnnnnnnnnnnnnnnnnnnnnnnnnnnnnnnnnnnnnnnnnnnnnnnnnnnnnnnnnnnnnnnnnnnnnnnnnnnnnnnnnnnnnnnnnnnnnnnnnnnnnnnnnnnnnnnnnnnnnnnnnnnnnnnnnnnnnnnnnnnnnnnnnnnnnnnnnnnnnnnnnnnnnnnnnnnnnnnnnnnnnnnnnnnnnnnnnnnnnnnnnnnnnnnnnnnnnnnnnnnnnnnnnnnnnnnnnnnnnnnnnnnnnnnnnnnnnnnnnnnnnnnnnnnnnnnnnnnnnnnnnnnnnnnnnnnnnnnnnnnnnnnnnnnnnnnnnnnnnnnnnnnnnnnnnnnnnnnnnnnnnnnnnnnnnnnnnnnnnnnnnnnnnnnnnnnnnnnnnnnnnnnnnnnnnnnnnnnnnnnnnnnnnnnnnnnnnnnnnnnnnnnnnnnnnnnnnnnnnnnnnnnnnnnnnnnnnnnnnnnnnnnnnnnnnnnnnnnnnnnnnnnnnnnnnnnnnnnnnnnnnnnnnnnnnnnnnnnnnnnnnnnnnnnnnnnnnnnnnnnnnnnnnnnnnnnnnnnnnnnnnnnnnnnnnnnnnnnnnnnnnnnnnnnnnnnnnnnnnnnnnnnnnnnnnnnnnnnnnnnnnnnnnnnnnnnnnnnnnnnnnnnnnnnnnnnnnnnnnnnnnnnnnnnnnnnnnnnnnnnnnnnnnnnnnnnnnnnnnnnnnnnnnnnnnnnnnnnnnnnnnnnnnnnnnnnnnnnnnnnnnnnnnnnnnnnnnnnnnnnnnnnnnnnnnnnnnnnnnnnnnnnnnnnnnnnnnnnnnnnnnnnnnnnnnnnnnnnnnnnnnnnnnnnnnnnnnnnnnnnnnnnnnnnnnnnnnnnnnnnnnnnnnnnnnnnnnnnnnnnnnnnnnnnnnnnnnnnnnnnnnnnnnnnnnnnnnnnnnnnnnnnnnnnnnnnnnnnnnnnnnnnnnnnnnnnnnnnnnnnnnnnnnnnnnnnnnnnnnnnnnnnnnnnnnnnnnnnnnnnnnnnnnnnnnnnnnnnnnnnnnnnnnnnnnnnnnnnnnnnnnnnnnnnnnnnnnnnnnnnnnnnnnnnnnnnnnnnnnnnnnnnnnnnnnnnnnnnnnnnnnnnnnnnnnnnnnnnnnnnnnnnnnnnnnnnnnnnnnnnnnnnnnnnnnnnnnnnnnnnnnnnnnnnnnnnnnnnnnnnnnnnnnnnnnnnnnnnnnnnnnnnnnnnnnnnnnnnnnnnnnnnnnnnnnnnnnnnnnnnnnnnnnnnnnnnnnnnnnnnnnnnnnnnnnnnnnnnnnnnnnnnnnnnnnnnnnnnnnnnnnnnnnnnnnnnnnnnnnnnnnnnnnnnnnnnnnnnnnnnnnnnnnnnnnnnnnnnnnnnnnnnnnnnnnnnnnnnnnnnnnnnnnnnnnnnnnnnnnnnnnnnnnnnnnnnnnnnnnnnnnnnnnnnnnnnnnnnnnnnnnnnnnnnnnnnnnnnnnnnnnnnnnnnnnnnnnnnnnnnnnnnnnnnnnnnnnnnnnnnnnnnnnnnnnnnnnnnnnnnnnnnnnnnnnnnnnnnnnnnnnnnnnnnnnnnnnnnnnnnnnnnnnnnnnnnnnnnnnnnnnnnnnnnnnnnnnnnnnnnnnnnnnnnnnnnnnnnnnnnnnnnnnnnnnnnnnnnnnnnnnnnnnnnnnnnnnnnnnnnnnnnnnnnnnnnnnnnnnnnnnnnnnnnnnnnnnnnnnnnnnnnnnnnnnnnnnnnnnnnnnnnnnnnnnnnnnnnnnnnnnnnnnnnnnnnnnnnnnnnnnnnnnnnnnnnnnnnnnnnnnnnnnnnnnnnnnnnnnnnnnnnnnnnnnnnnnnnnnnnnnnnnnnnnnnnnnnnnnnnnnnnnnnnnnnnnnnnnnnnnnnnnnnnnnnnnnnnnnnnnnnnnnnnnnnnnnnnnnnnnnnnnnnnnnnnnnnnnnnnnnnnnnnnnnnnnnnnnnnnnnnnnnnnnnnnnnnnnnnnnnnnnnnnnnnnnnnnnnnnnnnnnnnnnnnnnnnnnnnnnnnnnnnnnnnnnnnnnnnnnnnnnnnnnnnnnnnnnnnnnnnnnnnnnnnnnnnnnnnnnnnnnnnnnnnnnnnnnnnnnnnnnnnnnnnnnnnnnnnnnnnnnnnnnnnnnnnnnnnnnnnnnnnnnnnnnnnnnnnnnnnnnnnnnnnnnnnnnnnnnnnnnnnnnnnnnnnnnnnnnnnnnnnnnnnnnnnnnnnnnnnnnnnnnnnnnnnnnnnnnnnnnnnnnnnnnnnnnnnnnnnnnnnnnnnnnnnnnnnnnnnnnnnnnnnnnnnnnnnnnnnnnnnnnnnnnnnnnnnnnnnnnnnnnnnnnnnnnnnnnnnnnnnnnnnnnnnnnnnnnnnnnnnnnnnnnnnnnnnnnnnnnnnnnnnnnnnnnnnnnnnnnnnnnnnnnnnnnnnnnnnnnnnnnnnnnnnnnnnnnnnnnnnnnnnnnnnnnnnnnnnnnnnnnnnnnnnnnnnnnnnnnnnnnnnnnnnnnnnnnnnnnnnnnnnnnnnnnnnnnnnnnnnnnnnnnnnnnnnnnnnnnnnnnnnnnnnnnnnnnnnnnnnnnnnnnnnnnnnnnnnnnnnnnnnnnnnnnnnnnnnnnnnnnnnnnnnnnnnnnnnnnnnnnnnnnnnnnnnnnnnnnnnnnnnnnnnnnnnnnnnnnnnnnnnnnnnnnnnnnnnnnnnnnnnnnnnnnnnnnnnnnnnnnnnnnnnnnnnnnnnnnnnnnnnnnnnnnnnnnnnnnnnnnnnnnnnnnnnnnnnnnnnnnnnnnnnnnnnnnnnnnnnnnnnnnnnnnnnnnnnnnnnnnnnnnnnnnnnnnnnnnnnnnnnnnnnnnnnnnnnnnnnnnnnnnnnnnnnnnnnnnnnnnnnnnnnnnnnnnnnnnnnnnnnnnnnnnnnnnnnnnnnnnnnnnnnnnnnnnnnnnnnnnnnnnnnnnnnnnnnnnnnnnnnnnnnnnnnnnnnnnnnnnnnnnnnnnnnnnnnnnnnnnnnnnnnnnnnnnnnnnnnnnnnnnnnnnnnnnnnnnnnnnnnnnnnnnnnnnnnnnnnnnnnnnnnnnnnnnnnnnnnnnnnnnnnnnnnnnnnnnnnnnnnnnnnnnnnnnnnnnnnnnnnnnnnnnnnnnnnnnnnnnnnnnnnnnnnnnnnnnnnnnnnnnnnnnnnnnnnnnnnnnnnnnnnnnnnnnnnnnnnnnnnnnnnnnnnnnnnnnnnnnnnnnnnnnnnnnnnnnnnnnnnnnnnnnnnnnnnnnnnnnnnnnnnnnnnnnnnnnnnnnnnnnnnnnnnnnnnnnnnnnnnnnnnnnnnnnnnnnnnnnnnnnnnnnnnnnnnnnnnnnnnnnnnnnnnnnnnnnnnnnnnnnnnnnnnnnnnnnnnnnnnnnnnnnnnnnnnnnnnnnnnnnnnnnnnnnnnnnnnnnnnnnnnnnnnnnnnnnnnnnnnnnnnnnnnnnnnnnnnnnnnnnnnnnnnnnnnnnnnnnnnnnnnnnnnnnnnnnnnnnnnnnnnnnnnnnnnnnnnnnnnnnnnnnnnnnnnnnnnnnnnnnnnnnnnnnnnnnnnnnnnnnnnnnnnnnnnnnnnnnnnnnnnnnnnnnnnnnnnnnnnnnnnnnnnnnnnnnnnnnnnnnnnnnnnnnnnnnnnnnnnnnnnnnnnnnnnnnnnnnnnnnnnnnnnnnnnnnnnnnnnnnnnnnnnnnnnnnnnnnnnnnnnnnnnnnnnnnnnnnnnnnnnnnnnnnnnnnnnnnnnnnnnnnnnnnnnnnnnnnnnnnnnnnnnnnnnnnnnnnnnnnnnnnnnnnnnnnnnnnnnnnnnnnnnnnnnnnnnnnnnnnnnnnnnnnnnnnnnnnnnnnnnnnnnnnnnnnnnnnnnnnnnnnnnnnnnnnnnnnnnnnnnnnnnnnnnnnnnnnnnnnnnnnnnnnnnnnnnnnnnnnnnnnnnnnnnnnnnnnnnnnnnnnnnnnnnnnnnnnnnnnnnnnnnnnnnnnnnnnnnnnnnnnnnnnnnnnnnnnnnnnnnnnnnnnnnnnnnnnnnnnnnnnnnnnnnnnnnnnnnnnnnnnnnnnnnnnnnnnnnnnnnnnnnnnnnnnnnnnnnnnnnnnnnnnnnnnnnnnnnnnnnnnnnnnnnnnnnnnnnnnnnnnnnnnnnnnnnnnnnnnnnnnnnnnnnnnnnnnnnnnnnnnnnnnnnnnnnnnnnnnnnnnnnnnnnnnnnnnnnnnnnnnnnnnnnnnnnnnnnnnnnnnnnnnnnnnnnnnnnnnnnnnnnnnnnnnnnnnnnnnnnnnnnnnnnnnnnnnnnnnnnnnnnnnnnnnnnnnnnnnnnnnnnnnnnnnnnnnnnnnnnnnnnnnnnnnnnnnnnnnnnnnnnnnnnnnnnnnnnnnnnnnnnnnnnnnnnnnnnnnnnnnnnnnnnnnnnnnnnnnnnnnnnnnnnnnnnnnnnnnnnnnnnnnnnnnnnnnnnnnnnnnnnnnnnnnnnnnnnnnnnnnnnnnnnnnnnnnnnnnnnnnnnnnnnnnnnnnnnnnnnnnnnnnnnnnnnnnnnnnnnnnnnnnnnnnnnnnnnnnnnnnnnnnnnnnnnnnnnnnnnnnnnnnnnnnnnnnnnnnnnnnnnnnnnnnnnnnnnnnnnnnnnnnnnnnnnnnnnnnnnnnnnnnnnnnnnnnnnnnnnnnnnnnnnnnnnnnnnnnnnnnnnnnnnnnnnnnnnnnnnnnnnnnnnnnnnnnnnnnnnnnnnnnnnnnnnnnnnnnnnnnnnnnnnnnnnnnnnnnnnnnnnnnnnnnnnnnnnnnnnnnnnnnnnnnnnnnnnnnnnnnnnnnnnnnnnnnnnnnnnnnnnnnnnnnnnnnnnnnnnnnnnnnnnnnnnnnnnnnnnnnnnnnnnnnnnnnnnnnnnnnnnnnnnnnnnnnnnnnnnnnnnnnnnnnnnnnnnnnnnnnnnnnnnnnnnnnnnnnnnnnnnnnnnnnnnnnnnnnnnnnnnnnnnnnnnnnnnnnnnnnnnnnnnnnnnnnnnnnnnnnnnnnnnnnnnnnnnnnnnnnnnnnnnnnnnnnnnnnnnnnnnnnnnnnnnnnnnnnnnnnnnnnnnnnnnnnnnnnnnnnnnnnnnnnnnnnnnnnnnnnnnnnnnnnnnnnnnnnnnnnnnnnnnnnnnnnnnnnnnnnnnnnnnnnnnnnnnnnnnnnnnnnnnnnnnnnnnnnnnnnnnnnnnnnnnnnnnnnnnnnnnnnnnnnnnnnnnnnnnnnnnnnnnnnnnnnnnnnnnnnnnnnnnnnnnnnnnnnnnnnnnnnnnnnnnnnnnnnnnnnnnnnnnnnnnnnnnnnnnnnnnnnnnnnnnnnnnnnnnnnnnnnnnnnnnnnnnnnnnnnnnnnnnnnnnnnnnnnnnnnnnnnnnnnnnnnnnnnnnnnnnnnnnnnnnnnnnnnnnnnnnnnnnnnnnnnnnnnnnnnnnnnnnnnnnnnnnnnnnnnnnnnnnnnnnnnnnnnnnnnnnnnnnnnnnnnnnnnnnnnnnnnnnnnnnnnnnnnnnnnnnnnnnnnnnnnnnnnnnnnnnnnnnnnnnnnnnnnnnnnnnnnnnnnnnnnnnnnnnnnnnnnnnnnnnnnnnnnnnnnnnnnnnnnnnnnnnnnnnnnnnnnnnnnnnnnnnnnnnnnnnnnnnnnnnnnnnnnnnnnnnnnnnnnnnnnnnnnnnnnnnnnnnnnnnnnnnnnnnnnnnnnnnnnnnnnnnnnnnnnnnnnnnnnnnnnnnnnnnnnnnnnnnnnnnnnnnnnnnnnnnnnnnnnnnnnnnnnnnnnnnnnnnnnnnnnnnnnnnnnnnnnnnnnnnnnnnnnnnnnnnnnnnnnnnnnnnnnnnnnnnnnnnnnnnnnnnnnnnnnnnnnnnnnnnnnnnnnnnnnnnnnnnnnnnnnnnnnnnnnnnnnnnnnnnnnnnnnnnnnnnnnnnnnnnnnnnnnnnnnnnnnnnnnnnnnnnnnnnnnnnnnnnnnnnnnnnnnnnnnnnnnnnnnnnnnnnnnnnnnnnnnnnnnnnnnnnnnnnnnnnnnnnnnnnnnnnnnnnnnnnnnnnnnnnnnnnnnnnnnnnnnnnnnnnnnnnnnnnnnnnnnnnnnnnnnnnnnnnnnnnnnnnnnnnnnnnnnnnnnnnnnnnnnnnnnnnnnnnnnnnnnnnnnnnnnnnnnnnnnnnnnnnnnnnnnnnnnnnnnnnnnnnnnnnnnnnnnnnnnnnnnnnnnnnnnnnnnnnnnnnnnnnnnnnnnnnnnnnnnnnnnnnnnnnnnnnnnnnnnnnnnnnnnnnnnnnnnnnnnnnnnnnnnnnnnnnnnnnnnnnnnnnnnnnnnnnnnnnnnnnnnnnnnnnnnnnnnnnnnnnnnnnnnnnnnnnnnnnnnnnnnnnnnnnnnnnnnnnnnnnnnnnnnnnnnnnnnnnnnnnnnnnnnnnnnnnnnnnnnnnnnnnnnnnnnnnnnnnnnnnnnnnnnnnnnnnnnnnnnnnnnnnnnnnnnnnnnnnnnnnnnnnnnnnnnnnnnnnnnnnnnnnnnnnnnnnnnnnnnnnnnnnnnnnnnnnnnnnnnnnnnnnnnnnnnnnnnnnnnnnnnnnnnnnnnnnnnnnnnnnnnnnnnnnnnnnnnnnnnnnnnnnnnnnnnnnnnnnnnnnnnnnnnnnnnnnnnnnnnnnnnnnnnnnnnnnnnnnnnnnnnnnnnnnnnnnnnnnnnnnnnnnnnnnnnnnnnnnnnnnnnnnnnnnnnnnnnnnnnnnnnnnnnnnnnnnnnnnnnnnnnnnnnnnnnnnnnnnnnnnnnnnnnnnnnnnnnnnnnnnnnnnnnnnnnnnnnnnnnnnnnnnnnnnnnnnnnnnnnnnnnnnnnnnnnnnnnnnnnnnnnnnnnnnnnnnnnnnnnnnnnnnnnnnnnnnnnnnnnnnnnnnnnnnnnnnnnnnnnnnnnnnnnnnnnnnnnnnnnnnnnnnnnnnnnnnnnnnnnnnnnnnnnnnnnnnnnnnnnnnnnnnnnnnnnnnnnnnnnnnnnnnnnnnnnnnnnnnnnnnnnnnnnnnnnnnnnnnnnnnnnnnnnnnnnnnnnnnnnnnnnnnnnnnnnnnnnnnnnnnnnnnnnnnnnnnnnnnnnnnnnnnnnnnnnnnnnnnnnnnnnnnnnnnnnnnnnnnnnnnnnnnnnnnnnnnnnnnnnnnnnnnnnnnnnnnnnnnnnnnnnnnnnnnnnnnnnnnnnnnnnnnnnnnnnnnnnnnnnnnnnnnnnnnnnnnnnnnnnnnnnnnnnnnnnnnnnnnnnnnnnnnnnnnnnnnnnnnnnnnnnnnnnnnnnnnnnnnnnnnnnnnnnnnnnnnnnnnnnnnnnnnnnnnnnnnnnnnnnnnnnnnnnnnnnnnnnnnnnnnnnnnnnnnnnnnnnnnnnnnnnnnnnnnnnnnnnnnnnnnnnnnnnnnnnnnnnnnnnnnnnnnnnnnnnnnnnnnnnnnnnnnnnnnnnnnnnnnnnnnnnnnnnnnnnnnnnnnnnnnnnnnnnnnnnnnnnnnnnnnnnnnnnnnnnnnnnnnnnnnnnnnnnnnnnnnnnnnnnnnnnnnnnnnnnnnnnnnnnnnnnnnnnnnnnnnnnnnnnnnnnnnnnnnnnnnnnnnnnnnnnnnnnnnnnnnnnnnnnnnnnnnnnnnnnnnnnnnnnnnnnnnnnnnnnnnnnnnnnnnnnnnnnnnnnnnnnnnnnnnnnnnnnnnnnnnnnnnnnnnnnnnnnnnnnnnnnnnnnnnnnnnnnnnnnnnnnnnnnnnnnnnnnnnnnnnnnnnnnnnnnnnnnnnnnnnnnnnnnnnnnnnnnnnnnnnnnnnnnnnnnnnnnnnnnnnnnnnnnnnnnnnnnnnnnnnnnnnnnnnnnnnnnnnnnnnnnnnnnnnnnnnnnnnnnnnnnnnnnnnnnnnnnnnnnnnnnnnnnnnnnnnnnnnnnnnnnnnnnnnnnnnnnnnnnnnnnnnnnnnnnnnnnnnnnnnnnnnnnnnnnnnnnnnnnnnnnnnnnnnnnnnnnnnnnnnnnnnnnnnnnnnnnnnnnnnnnnnnnnnnnnnnnnnnnnnnnnnnnnnnnnnnnnnnnnnnnnnnnnnnnnnnnnnnnnnnnnnnnnnnnnnnnnnnnnnnnnnnnnnnnnnnnnnnnnnnnnnnnnnnnnnnnnnnnnnnnnnnnnnnnnnnnnnnnnnnnnnnnnnnnnnnnnnnnnnnnnnnnnnnnnnnnnnnnnnnnnnnnnnnnnnnnnnnnnnnnnnnnnnnnnnnnnnnnnnnnnnnnnnnnnnnnnnnnnnnnnnnnnnnnnnnnnnnnnnnnnnnnnnnnnnnnnnnnnnnnnnnnnnnnnnnnnnnnnnnnnnnnnnnnnnnnnnnnnnnnnnnnnnnnnnnnnnnnnnnnnnnnnnnnnnnnnnnnnnnnnnnnnnnnnnnnnnnnnnnnnnnnnnnnnnnnnnnnnnnnnnnnnnnnnnnnnnnnnnnnnnnnnnnnnnnnnnnnnnnnnnnnnnnnnnnnnnnnnnnnnnnnnnnnnnnnnnnnnnnnnnnnnnnnnnnnnnnnnnnnnnnnnnnnnnnnnnnnnnnnnnnnnnnnnnnnnnnnnnnnnnnnnnnnnnnnnnnnnnnnnnnnnnnnnnnnnnnnnnnnnnnnnnnnnnnnnnnnnnnnnnnnnnnnnnnnnnnnnnnnnnnnnnnnnnnnnnnnnnnnnnnnnnnnnnnnnnnnnnnnnnnnnnnnnnnnnnnnnnnnnnnnnnnnnnnnnnnnnnnnnnnnnnnnnnnnnnnnnnnnnnnnnnnnnnnnnnnnnnnnnnnnnnnnnnnnnnnnnnnnnnnnnnnnnnnnnnnnnnnnnnnnnnnnnnnnnnnnnnnnnnnnnnnnnnnnnnnnnnnnnnnnnnnnnnnnnnnnnnnnnnnnnnnnnnnnnnnnnnnnnnnnnnnnnnnnnnnnnnnnnnnnnnnnnnnnnnnnnnnnnnnnnnnnnnnnnnnnnnnnnnnnnnnnnnnnnnnnnnnnnnnnnnnnnnnnnnnnnnnnnnnnnnnnnnnnnnnnnnnnnnnnnnnnnnnnnnnnnnnnnnnnnnnnnnnnnnnnnnnnnnnnnnnnnnnnnnnnnnnnnnnnnnnnnnnnnnnnnnnnnnnnnnnnnnnnnnnnnnnnnnnnnnnnnnnnnnnnnnnnnnnnnnnnnnnnnnnnnnnnnnnnnnnnnnnnnnnnnnnnnnnnnnnnnnnnnnnnnnnnnnnnnnnnnnnnnnnnnnnnnnnnnnnnnnnnnnnnnnnnnnnnnnnnnnnnnnnnnnnnnnnnnnnnnnnnnnnnnnnnnnnnnnnnnnnnnnnnnnnnnnnnnnnnnnnnnnnnnnnnnnnnnnnnnnnnnnnnnnnnnnnnnnnnnnnnnnnnnnnnnnnnnnnnnnnnnnnnnnnnnnnnnnnnnnnnnnnnnnnnnnnnnnnnnnnnnnnnnnnnnnnnnnnnnnnnnnnnnnnnnnnnnnnnnnnnnnnnnnnnnnnnnnnnnnnnnnnnnnnnnnnnnnnnnnnnnnnnnnnnnnnnnnnnnnnnnnnnnnnnnnnnnnnnnnnnnnnnnnnnnnnnnnnnnnnnnnnnnnnnnnnnnnnnnnnnnnnnnnnnnnnnnnnnnnnnnnnnnnnnnnnnnnnnnnnnnnnnnnnnnnnnnnnnnnnnnnnnnnnnnnnnnnnnnnnnnnnnnnnnnnnnnnnnnnnnnnnnnnnnnnnnnnnnnnnnnnnnnnnnnnnnnnnnnnnnnnnnnnnnnnnnnnnnnnnnnnnnnnnnnnnnnnnnnnnnnnnnnnnnnnnnnnnnnnnnnnnnnnnnnnnnnnnnnnnnnnnnnnnnnnnnnnnnnnnnnnnnnnnnnnnnnnnnnnnnnnnnnnnnnnnnnnnnnnnnnnnnnnnnnnnnnnnnnnnnnnnnnnnnnnnnnnnnnnnnnnnnnnnnnnnnnnnnnnnnnnnnnnnnnnnnnnnnnnnnnnnnnnnnnnnnnnnnnnnnnnnnnnnnnnnnnnnnnnnnnnnnnnnnnnnnnnnnnnnnnnnnnnnnnnnnnnnnnnnnnnnnnnnnnnnnnnnnnnnnnnnnnnnnnnnnnnnnnnnnnnnnnnnnnnnnnnnnnnnnnnnnnnnnnnnnnnnnnnnnnnnnnnnnnnnnnnnnnnnnnnnnnnnnnnnnnnnnnnnnnnnnnnnnnnnnnnnnnnnnnnnnnnnnnnnnnnnnnnnnnnnnnnnnnnnnnnnnnnnnnnnnnnnnnnnnnnnnnnnnnnnnnnnnnnnnnnnnnnnnnnnnnnnnnnnnnnnnnnnnnnnnnnnnnnnnnnnnnnnnnnnnnnnnnnnnnnnnnnnnnnnnnnnnnnnnnnnnnnnnnnnnnnnnnnnnnnnnnnnnnnnnnnnnnnnnnnnnnnnnnnnnnnnnnnnnnnnnnnnnnnnnnnnnnnnnnnnnnnnnnnnnnnnnnnnnnnnnnnnnnnnnnnnnnnnnnnnnnnnnnnnnnnnnnnnnnnnnnnnnnnnnnnnnnnnnnnnnnnnnnnnnnnnnnnnnnnnnnnnnnnnnnnnnnnnnnnnnnnnnnnnnnnnnnnnnnnnnnnnnnnnnnnnnnnnnnnnnnnnnnnnnnnnnnnnnnnnnnnnnnnnnnnnnnnnnnnnnnnnnnnnnnnnnnnnnnnnnnnnnnnnnnnnnnnnnnnnnnnnnnnnnnnnnnnnnnnnnnnnnnnnnnnnnnnnnnnnnnnnnnnnnnnnnnnnnnnnnnnnnnnnnnnnnnnnnnnnnnnnnnnnnnnnnnnnnnnnnnnnnnnnnnnnnnnnnnnnnnnnnnnnnnnnnnnnnnnnnnnnnnnnnnnnnnnnnnnnnnnnnnnnnnnnnnnnnnnnnnnnnnnnnnnnnnnnnnnnnnnnnnnnnnnnnnnnnnnnnnnnnnnnnnnnnnnnnnnnnnnnnnnnnnnnnnnnnnnnnnnnnnnnnnnnnnnnnnnnnnnnnnnnnnnnnnnnnnnnnnnnnnnnnnnnnnnnnnnnnnnnnnnnnnnnnnnnnnnnnnnnnnnnnnnnnnnnnnnnnnnnnnnnnnnnnnnnnnnnnnnnnnnnnnnnnnnnnnnnnnnnnnnnnnnnnnnnnnnnnnnnnnnnnnnnnnnnnnnnnnnnnnnnnnnnnnnnnnnnnnnnnnnnnnnnnnnnnnnnnnnnnnnnnnnnnnnnnnnnnnnnnnnnnnnnnnnnnnnnnnnnnnnnnnnnnnnnnnnnnnnnnnnnnnnnnnnnnnnnnnnnnnnnnnnnnnnnnnnnnnnnnnnnnnnnnnnnnnnnnnnnnnnnnnnnnnnnnnnnnnnnnnnnnnnnnnnnnnnnnnnnnnnnnnnnnnnnnnnnnnnnnnnnnnnnnnnnnnnnnnnnnnnnnnnnnnnnnnnnnnnnnnnnnnnnnnnnnnnnnnnnnnnnnnnnnnnnnnnnnnnnnnnnnnnnnnnnnnnnnnnnnnnnnnnnnnnnnnnnnnnnnnnnnnnnnnnnnnnnnnnnnnnnnnnnnnnnnnnnnnnnnnnnnnnnnnnnnnnnnnnnnnnnnnnnnnnnnnnnnnnnnnnnnnnnnnnnnnnnnnnnnnnnnnnnnnnnnnnnnnnnnnnnnnnnnnnnnnnnnnnnnnnnnnnnnnnnnnnnnnnnnnnnnnnnnnnnnnnnnnnnnnnnnnnnnnnnnnnnnnnnnnnnnnnnnnnnnnnnnnnnnnnnnnnnnnnnnnnnnnnnnnnnnnnnnnnnnnnnnnnnnnnnnnnnnnnnnnnnnnnnnnnnnnnnnnnnnnnnnnnnnnnnnnnnnnnnnnnnnnnnnnnnnnnnnnnnnnnnnnnnnnnnnnnnnnnnnnnnnnnnnnnnnnnnnnnnnnnnnnnnnnnnnnnnnnnnnnnnnnnnnnnnnnnnnnnnnnnnnnnnnnnnnnnnnnnnnnnnnnnnnnnnnnnnnnnnnnnnnnnnnnnnnnnnnnnnnnnnnnnnnnnnnnnnnnnnnnnnnnnnnnnnnnnnnnnnnnnnnnnnnnnnnnnnnnnnnnnnnnnnnnnnnnnnnnnnnnnnnnnnnnnnnnnnnnnnnnnnnnnnnnnnnnnnnnnnnnnnnnnnnnnnnnnnnnnnnnnnnnnnnnnnnnnnnnnnnnnnnnnnnnnnnnnnnnnnnnnnnnnnnnnnnnnnnnnnnnnnnnnnnnnnnnnnnnnnnnnnnnnnnnnnnnnnnnnnnnnnnnnnnnnnnnnnnnnnnnnnnnnnnnnnnnnnnnnnnnnnnnnnnnnnnnnnnnnnnnnnnnnnnnnnnnnnnnnnnnnnnnnnnnnnnnnnnnnnnnnnnnnnnnnnnnnnnnnnnnnnnnnnnnnnnnnnnnnnnnnnnnnnnnnnnnnnnnnnnnnnnnnnnnnnnnnnnnnnnnnnnnnnnnnnnnnnnnnnnnnnnnnnnnnnnnnnnnnnnnnnnnnnnnnnnnnnnnnnnnnnnnnnnnnnnnnnnnnnnnnnnnnnnnnnnnnnnnnnnnnnnnnnnnnnnnnnnnnnnnnnnnnnnnnnnnnnnnnnnnnnnnnnnnnnnnnnnnnnnnnnnnnnnnnnnnnnnnnnnnnnnnnnnnnnnnnnnnnnnnnnnnnnnnnnnnnnnnnnnnnnnnnnnnnnnnnnnnnnnnnnnnnnnnnnnnnnnnnnnnnnnnnnnnnnnnnnnnnnnnnnnnnnnnnnnnnnnnnnnnnnnnnnnnnnnnnnnnnnnnnnnnnnnnnnnnnnnnnnnnnnnnnnnnnnnnnnnnnnnnnnnnnnnnnnnnnnnnnnnnnnnnnnnnnnnnnnnnnnnnnnnnnnnnnnnnnnnnnnnnnnnnnnnnnnnnnnnnnnnnnnnnnnnnnnnnnnnnnnnnnnnnnnnnnnnnnnnnnnnnnnnnnnnnnnnnnnnnnnnnnnnnnnnnnnnnnnnnnnnnnnnnnnnnnnnnnnnnnnnnnnnnnnnnnnnnnnnnnnnnnnnnnnnnnnnnnnnnnnnnnnnnnnnnnnnnnnnnnnnnnnnnnnnnnnnnnnnnnnnnnnnnnnnnnnnnnnnnnnnnnnnnnnnnnnnnnnnnnnnnnnnnnnnnnnnnnnnnnnnnnnnnnnnnnnnnnnnnnnnnnnnnnnnnnnnnnnnnnnnnnnnnnnnnnnnnnnnnnnnnnnnnnnnnnnnnnnnnnnnnnnnnnnnnnnnnnnnnnnnnnnnnnnnnnnnnnnnnnnnnnnnnnnnnnnnnnnnnnnnnnnnnnnnnnnnnnnnnnnnnnnnnnnnnnnnnnnnnnnnnnnnnnnnnnnnnnnnnnnnnnnnnnnnnnnnnnnnnnnnnnnnnnnnnnnnnnnnnnnnnnnnnnnnnnnnnnnnnnnnnnnnnnnnnnnnnnnnnnnnnnnnnnnnnnnnnnnnnnnnnnnnnnnnnnnnnnnnnnnnnnnnnnnnnnnnnnnnnnnnnnnnnnnnnnnnnnnnnnnnnnnnnnnnnnnnnnnnnnnnnnnnnnnnnnnnnnnnnnnnnnnnnnnnnnnnnnnnnnnnnnnnnnnnnnnnnnnnnnnnnnnnnnnnnnnnnnnnnnnnnnnnnnnnnnnnnnnnnnnnnnnnnnnnnnnnnnnnnnnnnnnnnnnnnnnnnnnnnnnnnnnnnnnnnnnnnnnnnnnnnnnnnnnnnnnnnnnnnnnnnnnnnnnnnnnnnnnnnnnnnnnnnnnnnnnnnnnnnnnnnnnnnnnnnnnnnnnnnnnnnnnnnnnnnnnnnnnnnnnnnnnnnnnnnnnnnnnnnnnnnnnnnnnnnnnnnnnnnnnnnnnnnnnnnnnnnnnnnnnnnnnnnnnnnnnnnnnnnnnnnnnnnnnnnnnnnnnnnnnnnnnnnnnnnnnnnnnnnnnnnnnnnnnnnnnnnnnnnnnnnnnnnnnnnnnnnnnnnnnnnnnnnnnnnnnnnnnnnnnnnnnnnnnnnnnnnnnnnnnnnnnnnnnnnnnnnnnnnnnnnnnnnnnnnnnnnnnnnnnnnnnnnnnnnnnnnnnnnnnnnnnnnnnnnnnnnnnnnnnnnnnnnnnnnnnnnnnnnnnnnnnnnnnnnnnnnnnnnnnnnnnnnnnnnnnnnnnnnnnnnnnnnnnnnnnnnnnnnnnnnnnnnnnnnnnnnnnnnnnnnnnnnnnnnnnnnnnnnnnnnnnnnnnnnnnnnnnnnnnnnnnnnnnnnnnnnnnnnnnnnnnnnnnnnnnnnnnnnnnnnnnnnnnnnnnnnnnnnnnnnnnnnnnnnnnnnnnnnnnnnnnnnnnnnnnnnnnnnnnnnnnnnnnnnnnnnnnnnnnnnnnnnnnnnnnnnnnnnnnnnnnnnnnnnnnnnnnnnnnnnnnnnnnnnnnnnnnnnnnnnnnnnnnnnnnnnnnnnnnnnnnnnnnnnnnnnnnnnnnnnnnnnnnnnnnnnnnnnnnnnnnnnnnnnnnnnnnnnnnnnnnnnnnnnnnnnnnnnnnnnnnnnnnnnnnnnnnnnnnnnnnnnnnnnnnnnnnnnnnnnnnnnnnnnnnnnnnnnnnnnnnnnnnnnnnnnnnnnnnnnnnnnnnnnnnnnnnnnnnnnnnnnnnnnnnnnnnnnnnnnnnnnnnnnnnnnnnnnnnnnnnnnnnnnnnnnnnnnnnnnnnnnnnnnnnnnnnnnnnnnnnnnnnnnnnnnnnnnnnnnnnnnnnnnnnnnnnnnnnnnnnnnnnnnnnnnnnnnnnnnnnnnnnnnnnnnnnnnnnnnnnnnnnnnnnnnnnnnnnnnnnnnnnnnnnnnnnnnnnnnnnnnnnnnnnnnnnnnnnnnnnnnnnnnnnnnnnnnnnnnnnnnnnnnnnnnnnnnnnnnnnnnnnnnnnnnnnnnnnnnnnnnnnnnnnnnnnnnnnnnnnnnnnnnnnnnnnnnnnnnnnnnnnnnnnnnnnnnnnnnnnnnnnnnnnnnnnnnnnnnnnnnnnnnnnnnnnnnnnnnnnnnnnnnnnnnnnnnnnnnnnnnnnnnnnnnnnnnnnnnnnnnnnnnnnnnnnnnnnnnnnnnnnnnnnnnnnnnnnnnnnnnnnnnnnnnnnnnnnnnnnnnnnnnnnnnnnnnnnnnnnnnnnnnnnnnnnnnnnnnnnnnnnnnnnnnnnnnnnnnnnnnnnnnnnnnnnnnnnnnnnnnnnnnnnnnnnnnnnnnnnnnnnnnnnnnnnnnnnnnnnnnnnnnnnnnnnnnnnnnnnnnnnnnnnnnnnnnnnnnnnnnnnnnnnnnnnnnnnnnnnnnnnnnnnnnnnnnnnnnnnnnnnnnnnnnnnnnnnnnnnnnnnnnnnnnnnnnnnnnnnnnnnnnnnnnnnnnnnnnnnnnnnnnnnnnnnnnnnnnnnnnnnnnnnnnnnnnnnnnnnnnnnnnnnnnnnnnnnnnnnnnnnnnnnnnnnnnnnnnnnnnnnnnnnnnnnnnnnnnnnnnnnnnnnnnnnnnnnnnnnnnnnnnnnnnnnnnnnnnnnnnnnnnnnnnnnnnnnnnnnnnnnnnnnnnnnnnnnnnnnnnnnnnnnnnnnnnnnnnnnnnnnnnnnnnnnnnnnnnnnnnnnnnnnnnnnnnnnnnnnnnnnnnnnnnnnnnnnnnnnnnnnnnnnnnnnnnnnnnnnnnnnnnnnnnnnnnnnnnnnnnnnnnnnnnnnnnnnnnnnnnnnnnnnnnnnnnnnnnnnnnnnnnnnnnnnnnnnnnnnnnnnnnnnnnnnnnnnnnnnnnnnnnnnnnnnnnnnnnnnnnnnnnnnnnnnnnnnnnnnnnnnnnnnnnnnnnnnnnnnnnnnnnnnnnnnnnnnnnnnnnnnnnnnnnnnnnnnnnnnnnnnnnnnnnnnnnnnnnnnnnnnnnnnnnnnnnnnnnnnnnnnnnnnnnnnnnnnnnnnnnnnnnnnnnnnnnnnnnnnnnnnnnnnnnnnnnnnnnnnnnnnnnnnnnnnnnnnnnnnnnnnnnnnnnnnnnnnnnnnnnnnnnnnnnnnnnnnnnnnnnnnnnnnnnnnnnnnnnnnnnnnnnnnnnnnnnnnnnnnnnnnnnnnnnnnnnnnnnnnnnnnnnnnnnnnnnnnnnnnnnnnnnnnnnnnnnnnnnnnnnnnnnnnnnnnnnnnnnnnnnnnnnnnnnnnnnnnnnnnnnnnnnnnnnnnnnnnnnnnnnnnnnnnnnnnnnnnnnnnnnnnnnnnnnnnnnnnnnnnnnnnnnnnnnnnnnnnnnnnnnnnnnnnnnnnnnnnnnnnnnnnnnnnnnnnnnnnnnnnnnnnnnnnnnnnnnnnnnnnnnnnnnnnnnnnnnnnnnnnnnnnnnnnnnnnnnnnnnnnnnnnnnnnnnnnnnnnnnnnnnnnnnnnnnnnnnnnnnnnnnnnnnnnnnnnnnnnnnnnnnnnnnnnnnnnnnnnnnnnnnnnnnnnnnnnnnnnnnnnnnnnnnnnnnnnnnnnnnnnnnnnnnnnnnnnnnnnnnnnnnnnnnnnnnnnnnnnnnnnnnnnnnnnnnnnnnnnnnnnnnnnnnnnnnnnnnnnnnnnnnnnnnnnnnnnnnnnnnnnnnnnnnnnnnnnnnnnnnnnnnnnnnnnnnnnnnnnnnnnnnnnnnnnnnnnnnnnnnnnnnnnnnnnnnnnnnnnnnnnnnnnnnnnnnnnnnnnnnnnnnnnnnnnnnnnnnnnnnnnnnnnnnnnnnnnnnnnnnnnnnnnnnnnnnnnnnnnnnnnnnnnnnnnnnnnnnnnnnnnnnnnnnnnnnnnnnnnnnnnnnnnnnnnnnnnnnnnnnnnnnnnnnnnnnnnnnnnnnnnnnnnnnnnnnnnnnnnnnnnnnnnnnnnnnnnnnnnnnnnnnnnnnnnnnnnnnnnnnnnnnnnnnnnnnnnnnnnnnnnnnnnnnnnnnnnnnnnnnnnnnnnnnnnnnnnnnnnnnnnnnnnnnnnnnnnnnnnnnnnnnnnnnnnnnnnnnnnnnnnnnnnnnnnnnnnnnnnnnnnnnnnnnnnnnnnnnnnnnnnnnnnnnnnnnnnnnnnnnnnnnnnnnnnnnnnnnnnnnnnnnnnnnnnnnnnnnnnnnnnnnnnnnnnnnnnnnnnnnnnnnnnnnnnnnnnnnnnnnnnnnnnnnnnnnnnnnnnnnnnnnnnnnnnnnnnnnnnnnnnnnnnnnnnnnnnnnnnnnnnnnnnnnnnnnnnnnnnnnnnnnnnnnnnnnnnnnnnnnnnnnnnnnnnnnnnnnnnnnnnnnnnnnnnnnnnnnnnnnnnnnnnnnnnnnnnnnnnnnnnnnnnnnnnnnnnnnnnnnnnnnnnnnnnnnnnnnnnnnnnnnnnnnnnnnnnnnnnnnnnnnnnnnnnnnnnnnnnnnnnnnnnnnnnnnnnnnnnnnnnnnnnnnnnnnnnnnnnnnnnnnnnnnnnnnnnnnnnnnnnnnnnnnnnnnnnnnnnnnnnnnnnnnnnnnnnnnnnnnnnnnnnnnnnnnnnnnnnnnnnnnnnnnnnnnnnnnnnnnnnnnnnnnnnnnnnnnnnnnnnnnnnnnnnnnnnnnnnnnnnnnnnnnnnnnnnnnnnnnnnnnnnnnnnnnnnnnnnnnnnnnnnnnnnnnnnnnnnnnnnnnnnnnnnnnnnnnnnnnnnnnnnnnnnnnnnnnnnnnnnnnnnnnnnnnnnnnnnnnnnnnnnnnnnnnnnnnnnnnnnnnnnnnnnnnnnnnnnnnnnnnnnnnnnnnnnnnnnnnnnnnnnnnnnnnnnnnnnnnnnnnnnnnnnnnnnnnnnnnnnnnnnnnnnnnnnnnnnnnnnnnnnnnnnnnnnnnnnnnnnnnnnnnnnnnnnnnnnnnnnnnnnnnnnnnnnnnnnnnnnnnnnnnnnnnnnnnnnnnnnnnnnnnnnnnnnnnnnnnnnnnnnnnnnnnnnnnnnnnnnnnnnnnnnnnnnnnnnnnnnnnnnnnnnnnnnnnnnnnnnnnnnnnnnnnnnnnnnnnnnnnnnnnnnnnnnnnnnnnnnnnnnnnnnnnnnnnnnnnnnnnnnnnnnnnnnnnnnnnnnnnnnnnnnnnnnnnnnnnnnnnnnnnnnnnnnnnnnnnnnnnnnnnnnnnnnnnnnnnnnnnnnnnnnnnnnnnnnnnnnnnnnnnnnnnnnnnnnnnnnnnnnnnnnnnnnnnnnnnnnnnnnnnnnnnnnnnnnnnnnnnnnnnnnnnnnnnnnnnnnnnnnnnnnnnnnnnnnnnnnnnnnnnnnnnnnnnnnnnnnnnnnnnnnnnnnnnnnnnnnnnnnnnnnnnnnnnnnnnnnnnnnnnnnnnnnnnnnnnnnnnnnnnnnnnnnnnnnnnnnnnnnnnnnnnnnnnnnnnnnnnnnnnnnnnnnnnnnnnnnnnnnnnnnnnnnnnnnnnnnnnnnnnnnnnnnnnnnnnnnnnnnnnnnnnnnnnnnnnnnnnnnnnnnnnnnnnnnnnnnnnnnnnnnnnnnnnnnnnnnnnnnnnnnnnnnnnnnnnnnnnnnnnnnnnnnnnnnnnnnnnnnnnnnnnnnnnnnnnnnnnnnnnnnnnnnnnnnnnnnnnnnnnnnnnnnnnnnnnnnnnnnnnnnnnnnnnnnnnnnnnnnnnnnnnnnnnnnnnnnnnnnnnnnnnnnnnnnnnnnnnnnnnnnnnnnnnnnnnnnnnnnnnnnnnnnnnnnnnnnnnnnnnnnnnnnnnnnnnnnnnnnnnnnnnnnnnnnnnnnnnnnnnnnnnnnnnnnnnnnnnnnnnnnnnnnnnnnnnnnnnnnnnnnnnnnnnnnnnnnnnnnnnnnnnnnnnnnnnnnnnnnnnnnnnnnnnnnnnnnnnnnnnnnnnnnnnnnnnnnnnnnnnnnnnnnnnnnnnnnnnnnnnnnnnnnnnnnnnnnnnnnnnnnnnnnnnnnnnnnnnnnnnnnnnnnnnnnnnnnnnnnnnnnnnnnnnnnnnnnnnnnnnnnnnnnnnnnnnnnnnnnnnnnnnnnnnnnnnnnnnnnnnnnnnnnnnnnnnnnnnnnnnnnnnnnnnnnnnnnnnnnnnnnnnnnnnnnnnnnnnnnnnnnnnnnnnnnnnnnnnnnnnnnnnnnnnnnnnnnnnnnnnnnnnnnnnnnnnnnnnnnnnnnnnnnnnnnnnnnnnnnnnnnnnnnnnnnnnnnnnnnnnnnnnnnnnnnnnnnnnnnnnnnnnnnnnnnnnnnnnnnnnnnnnnnnnnnnnnnnnnnnnnnnnnnnnnnnnnnnnnnnnnnnnnnnnnnnnnnnnnnnnnnnnnnnnnnnnnnnnnnnnnnnnnnnnnnnnnnnnnnnnnnnnnnnnnnnnnnnnnnnnnnnnnnnnnnnnnnnnnnnnnnnnnnnnnnnnnnnnnnnnnnnnnnnnnnnnnnnnnnnnnnnnnnnnnnnnnnnnnnnnnnnnnnnnnnnnnnnnnnnnnnnnnnnnnnnnnnnnnnnnnnnnnnnnnnnnnnnnnnnnnnnnnnnnnnnnnnnnnnnnnnnnnnnnnnnnnnnnnnnnnnnnnnnnnnnnnnnnnnnnnnnnnnnnnnnnnnnnnnnnnnnnnnnnnnnnnnnnnnnnnnnnnnnnnnnnnnnnnnnnnnnnnnnnnnnnnnnnnnnnnnnnnnnnnnnnnnnnnnnnnnnnnnnnnnnnnnnnnnnnnnnnnnnnnnnnnnnnnnnnnnnnnnnnnnnnnnnnnnnnnnnnnnnnnnnnnnnnnnnnnnnnnnnnnnnnnnnnnnnnnnnnnnnnnnnnnnnnnnnnnnnnnnnnnnnnnnnnnnnnnnnnnnnnnnnnnnnnnnnnnnnnnnnnnnnnnnnnnnnnnnnnnnnnnnnnnnnnnnnnnnnnnnnnnnnnnnnnnnnnnnnnnnnnnnnnnnnnnnnnnnnnnnnnnnnnnnnnnnnnnnnnnnnnnnnnnnnnnnnnnnnnnnnnnnnnnnnnnnnnnnnnnnnnnnnnnnnnnnnnnnnnnnnnnnnnnnnnnnnnnnnnnnnnnnnnnnnnnnnnnnnnnnnnnnnnnnnnnnnnnnnnnnnnnnnnnnnnnnnnnnnnnnnnnnnnnnnnnnnnnnnnnnnnnnnnnnnnnnnnnnnnnnnnnnnnnnnnnnnnnnnnnnnnnnnnnnnnnnnnnnnnnnnnnnnnnnnnnnnnnnnnnnnnnnnnnnnnnnnnnnnnnnnnnnnnnnnnnnnnnnnnnnnnnnnnnnnnnnnnnnnnnnnnnnnnnnnnnnnnnnnnnnnnnnnnnnnnnnnnnnnnnnnnnnnnnnnnnnnnnnnnnnnnnnnnnnnnnnnnnnnnnnnnnnnnnnnnnnnnnnnnnnnnnnnnnnnnnnnnnnnnnnnnnnnnnnnnnnnnnnnnnnnnnnnnnnnnnnnnnnnnnnnnnnnnnnnnnnnnnnnnnnnnnnnnnnnnnnnnnnnnnnnnnnnnnnnnnnnnnnnnnnnnnnnnnnnnnnnnnnnnnnnnnnnnnnnnnnnnnnnnnnnnnnnnnnnnnnnnnnnnnnnnnnnnnnnnnnnnnnnnnnnnnnnnnnnnnnnnnnnnnnnnnnnnnnnnnnnnnnnnnnnnnnnnnnnnnnnnnnnnnnnnnnnnnnnnnnnnnnnnnnnnnnnnnnnnnnnnnnnnnnnnnnnnnnnnnnnnnnnnnnnnnnnnnnnnnnnnnnnnnnnnnnnnnnnnnnnnnnnnnnnnnnnnnnnnnnnnnnnnnnnnnnnnnnnnnnnnnnnnnnnnnnnnnnnnnnnnnnnnnnnnnnnnnnnnnnnnnnnnnnnnnnnnnnnnnnnnnnnnnnnnnnnnnnnnnnnnnnnnnnnnnnnnnnnnnnnnnnnnnnnnnnnnnnnnnnnnnnnnnnnnnnnnnnnnnnnnnnnnnnnnnnnnnnnnnnnnnnnnnnnnnnnnnnnnnnnnnnnnnnnnnnnnnnnnnnnnnnnnnnnnnnnnnnnnnnnnnnnnnnnnnnnnnnnnnnnnnnnnnnnnnnnnnnnnnnnnnnnnnnnnnnnnnnnnnnnnnnnnnnnnnnnnnnnnnnnnnnnnnnnnnnnnnnnnnnnnnnnnnnnnnnnnnnnnnnnnnnnnnnnnnnnnnnnnnnnnnnnnnnnnnnnnnnnnnnnnnnnnnnnnnnnnnnnnnnnnnnnnnnnnnnnnnnnnnnnnnnnnnnnnnnnnnnnnnnnnnnnnnnnnnnnnnnnnnnnnnnnnnnnnnnnnnnnnnnnnnnnnnnnnnnnnnnnnnnnnnnnnnnnnnnnnnnnnnnnnnnnnnnnnnnnnnnnnnnnnnnnnnnnnnnnnnnnnnnnnnnnnnnnnnnnnnnnnnnnnnnnnnnnnnnnnnnnnnnnnnnnnnnnnnnnnnnnnnnnnnnnnnnnnnnnnnnnnnnnnnnnnnnnnnnnnnnnnnnnnnnnnnnnnnnnnnnnnnnnnnnnnnnnnnnnnnnnnnnnnnnnnnnnnnnnnnnnnnnnnnnnnnnnnnnnnnnnnnnnnnnnnnnnnnnnnnnnnnnnnnnnnnnnnnnnnnnnnnnnnnnnnnnnnnnnnnnnnnnnnnnnnnnnnnnnnnnnnnnnnnnnnnnnnnnnnnnnnnnnnnnnnnnnnnnnnnnnnnnnnnnnnnnnnnnnnnnnnnnnnnnnnnnnnnnnnnnnnnnnnnnnnnnnnnnnnnnnnnnnnnnnnnnnnnnnnnnnnnnnnnnnnnnnnnnnnnnnnnnnnnnnnnnnnnnnnnnnnnnnnnnnnnnnnnnnnnnnnnnnnnnnnnnnnnnnnnnnnnnnnnnnnnnnnnnnnnnnnnnnnnnnnnnnnnnnnnnnnnnnnnnnnnnnnnnnnnnnnnnnnnnnnnnnnnnnnnnnnnnnnnnnnnnnnnnnnnnnnnnnnnnnnnnnnnnnnnnnnnnnnnnnnnnnnnnnnnnnnnnnnnnnnnnnnnnnnnnnnnnnnnnnnnnnnnnnnnnnnnnnnnnnnnnnnnnnnnnnnnnnnnnnnnnnnnnnnnnnnnnnnnnnnnnnnnnnnnnnnnnnnnnnnnnnnnnnnnnnnnnnnnnnnnnnnnnnnnnnnnnnnnnnnnnnnnnnnnnnnnnnnnnnnnnnnnnnnnnnnnnnnnnnnnnnnnnnnnnnnnnnnnnnnnnnnnnnnnnnnnnnnnnnnnnnnnnnnnnnnnnnnnnnnnnnnnnnnnnnnnnnnnnnnnnnnnnnnnnnnnnnnnnnnnnnnnnnnnnnnnnnnnnnnnnnnnnnnnnnnnnnnnnnnnnnnnnnnnnnnnnnnnnnnnnnnnnnnnnnnnnnnnnnnnnnnnnnnnnnnnnnnnnnnnnnnnnnnnnnnnnnnnnnnnnnnnnnnnnnnnnnnnnnnnnnnnnnnnnnnnnnnnnnnnnnnnnnnnnnnnnnnnnnnnnnnnnnnnnnnnnnnnnnnnnnnnnnnnnnnnnnnnnnnnnnnnnnnnnnnnnnnnnnnnnnnnnnnnnnnnnnnnnnnnnnnnnnnnnnnnnnnnnnnnnnnnnnnnnnnnnnnnnnnnnnnnnnnnnnnnnnnnnnnnnnnnnnnnnnnnnnnnnnnnnnnnnnnnnnnnnnnnnnnnnnnnnnnnnnnnnnnnnnnnnnnnnnnnnnnnnnnnnnnnnnnnnnnnnnnnnnnnnnnnnnnnnnnnnnnnnnnnnnnnnnnnnnnnnnnnnnnnnnnnnnnnnnnnnnnnnnnnnnnnnnnnnnnnnnnnnnnnnnnnnnnnnnnnnnnnnnnnnnnnnnnnnnnnnnnnnnnnnnnnnnnnnnnnnnnnnnnnnnnnnnnnnnnnnnnnnnnnnnnnnnnnnnnnnnnnnnnnnnnnnnnnnnnnnnnnnnnnnnnnnnnnnnnnnnnnnnnnnnnnnnnnnnnnnnnnnnnnnnnnnnnnnnnnnnnnnnnnnnnnnnnnnnnnnnnnnnnnnnnnnnnnnnnnnnnnnnnnnnnnnnnnnnnnnnnnnnnnnnnnnnnnnnnnnnnnnnnnnnnnnnnnnnnnnnnnnnnnnnnnnnnnnnnnnnnnnnnnnnnnnnnnnnnnnnnnnnnnnnnnnnnnnnnnnnnnnnnnnnnnnnnnnnnnnnnnnnnnnnnnnnnnnnnnnnnnnnnnnnnnnnnnnnnnnnnnnnnnnnnnnnnnnnnnnnnnnnnnnnnnnnnnnnnnnnnnnnnnnnnnnnnnnnnnnnnnnnnnnnnnnnnnnnnnnnnnnnnnnnnnnnnnnnnnnnnnnnnnnnnnnnnnnnnnnnnnnnnnnnnnnnnnnnnnnnnnnnnnnnnnnnnnnnnnnnnnnnnnnnnnnnnnnnnnnnnnnnnnnnnnnnnnnnnnnnnnnnnnnnnnnnnnnnnnnnnnnnnnnnnnnnnnnnnnnnnnnnnnnnnnnnnnnnnnnnnnnnnnnnnnnnnnnnnnnnnnnnnnnnnnnnnnnnnnnnnnnnnnnnnnnnnnnnnnnnnnnnnnnnnnnnnnnnnnnnnnnnnnnnnnnnnnnnnnnnnnnnnnnnnnnnnnnnnnnnnnnnnnnnnnnnnnnnnnnnnnnnnnnnnnnnnnnnnnnnnnnnnnnnnnnnnnnnnnnnnnnnnnnnnnnnnnnnnnnnnnnnnnnnnnnnnnnnnnnnnnnnnnnnnnnnnnnnnnnnnnnnnnnnnnnnnnnnnnnnnnnnnnnnnnnnnnnnnnnnnnnnnnnnnnnnnnnnnnnnnnnnnnnnnnnnnnnnnnnnnnnnnnnnnnnnnnnnnnnnnnnnnnnnnnnnnnnnnnnnnnnnnnnnnnnnnnnnnnnnnnnnnnnnnnnnnnnnnnnnnnnnnnnnnnnnnnnnnnnnnnnnnnnnnnnnnnnnnnnnnnnnnnnnnnnnnnnnnnnnnnnnnnnnnnnnnnnnnnnnnnnnnnnnnnnnnnnnnnnnnnnnnnnnnnnnnnnnnnnnnnnnnnnnnnnnnnnnnnnnnnnnnnnnnnnnnnnnnnnnnnnnnnnnnnnnnnnnnnnnnnnnnnnnnnnnnnnnnnnnnnnnnnnnnnnnnnnnnnnnnnnnnnnnnnnnnnnnnnnnnnnnnnnnnnnnnnnnnnnnnnnnnnnnnnnnnnnnnnnnnnnnnnnnnnnnnnnnnnnnnnnnnnnnnnnnnnnnnnnnnnnnnnnnnnnnnnnnnnnnnnnnnnnnnnnnnnnnnnnnnnnnnnnnnnnnnnnnnnnnnnnnnnnnnnnnnnnnnnnnnnnnnnnnnnnnnnnnnnnnnnnnnnnnnnnnnnnnnnnnnnnnnnnnnnnnnnnnnnnnnnnnnnnnnnnnnnnnnnnnnnnnnnnnnnnnnnnnnnnnnnnnnnnnnnnnnnnnnnnnnnnnnnnnnnnnnnnnnnnnnnnnnnnnnnnnnnnnnnnnnnnnnnnnnnnnnnnnnnnnnnnnnnnnnnnnnnnnnnnnnnnnnnnnnnnnnnnnnnnnnnnnnnnnnnnnnnnnnnnnnnnnnnnnnnnnnnnnnnnnnnnnnnnnnnnnnnnnnnnnnnnnnnnnnnnnnnnnnnnnnnnnnnnnnnnnnnnnnnnnnnnnnnnnnnnnnnnnnnnnnnnnnnnnnnnnnnnnnnnnnnnnnnnnnnnnnnnnnnnnnnnnnnnnnnnnnnnnnnnnnnnnnnnnnnnnnnnnnnnnnnnnnnnnnnnnnnnnnnnnnnnnnnnnnnnnnnnnnnnnnnnnnnnnnnnnnnnnnnnnnnnnnnnnnnnnnnnnnnnnnnnnnnnnnnnnnnnnnnnnnnnnnnnnnnnnnnnnnnnnnnnnnnnnnnnnnnnnnnnnnnnnnnnnnnnnnnnnnnnnnnnnnnnnnnnnnnnnnnnnnnnnnnnnnnnnnnnnnnnnnnnnnnnnnnnnnnnnnnnnnnnnnnnnnnnnnnnnnnnnnnnnnnnnnnnnnnnnnnnnnnnnnnnnnnnnnnnnnnnnnnnnnnnnnnnnnnnnnnnnnnnnnnnnnnnnnnnnnnnnnnnnnnnnnnnnnnnnnnnnnnnnnnnnnnnnnnnnnnnnnnnnnnnnnnnnnnnnnnnnnnnnnnnnnnnnnnnnnnnnnnnnnnnnnnnnnnnnnnnnnnnnnnnnnnnnnnnnnnnnnnnnnnnnnnnnnnnnnnnnnnnnnnnnnnnnnnnnnnnnnnnnnnnnnnnnnnnnnnnnnnnnnnnnnnnnnnnnnnnnnnnnnnnnnnnnnnnnnnnnnnnnnnnnnnnnnnnnnnnnnnnnnnnnnnnnnnnnnnnnnnnnnnnnnnnnnnnnnnnnnnnnnnnnnnnnnnnnnnnnnnnnnnnnnnnnnnnnnnnnnnnnnnnnnnnnnnnnnnnnnnnnnnnnnnnnnnnnnnnnnnnnnnnnnnnnnnnnnnnnnnnnnnnnnnnnnnnnnnnnnnnnnnnnnnnnnnnnnnnnnnnnnnnnnnnnnnnnnnnnnnnnnnnnnnnnnnnnnnnnnnnnnnnnnnnnnnnnnnnnnnnnnnnnnnnnnnnnnnnnnnnnnnnnnnnnnnnnnnnnnnnnnnnnnnnnnnnnnnnnnnnnnnnnnnnnnnnnnnnnnnnnnnnnnnnnnnnnnnnnnnnnnnnnnnnnnnnnnnnnnnnnnnnnnnnnnnnnnnnnnnnnnnnnnnnnnnnnnnnnnnnnnnnnnnnnnnnnnnnnnnnnnnnnnnnnnnnnnnnnnnnnnnnnnnnnnnnnnnnnnnnnnnnnnnnnnnnnnnnnnnnnnnnnnnnnnnnnnnnnnnnnnnnnnnnnnnnnnnnnnnnnnnnnnnnnnnnnnnnnnnnnnnnnnnnnnnnnnnnnnnnnnnnnnnnnnnnnnnnnnnnnnnnnnnnnnnnnnnnnnnnnnnnnnnnnnnnnnnnnnnnnnnnnnnnnnnnnnnnnnnnnnnnnnnnnnnnnnnnnnnnnnnnnnnnnnnnnnnnnnnnnnnnnnnnnnnnnnnnnnnnnnnnnnnnnnnnnnnnnnnnnnnnnnnnnnnnnnnnnnnnnnnnnnnnnnnnnnnnnnnnnnnnnnnnnnnnnnnnnnnnnnnnnnnnnnnnnnnnnnnnnnnnnnnnnnnnnnnnnnnnnnnnnnnnnnnnnnnnnnnnnnnnnnnnnnnnnnnnnnnnnnnnnnnnnnnnnnnnnnnnnnnnnnnnnnnnnnnnnnnnnnnnnnnnnnnnnnnnnnnnnnnnnnnnnnnnnnnnnnnnnnnnnnnnnnnnnnnnnnnnnnnnnnnnnnnnnnnnnnnnnnnnnnnnnnnnnnnnnnnnnnnnnnnnnnnnnnnnnnnnnnnnnnnnnnnnnnnnnnnnnnnnnnnnnnnnnnnnnnnnnnnnnnnnnnnnnnnnnnnnnnnnnnnnnnnnnnnnnnnnnnnnnnnnnnnnnnnnnnnnnnnnnnnnnnnnnnnnnnnnnnnnnnnnnnnnnnnnnnnnnnnnnnnnnnnnnnnnnnnnnnnnnnnnnnnnnnnnnnnnnnnnnnnnnnnnnnnnnnnnnnnnnnnnnnnnnnnnnnnnnnnnnnnnnnnnnnnnnnnnnnnnnnnnnnnnnnnnnnnnnnnnnnnnnnnnnnnnnnnnnnnnnnnnnnnnnnnnnnnnnnnnnnnnnnnnnnnnnnnnnnnnnnnnnnnnnnnnnnnnnnnnnnnnnnnnnnnnnnnnnnnnnnnnnnnnnnnnnnnnnnnnnnnnnnnnnnnnnnnnnnnnnnnnnnnnnnnnnnnnnnnnnnnnnnnnnnnnnnnnnnnnnnnnnnnnnnnnnnnnnnnnnnnnnnnnnnnnnnnnnnnnnnnnnnnnnnnnnnnnnnnnnnnnnnnnnnnnnnnnnnnnnnnnnnnnnnnnnnnnnnnnnnnnnnnnnnnnnnnnnnnnnnnnnnnnnnnnnnnnnnnnnnnnnnnnnnnnnnnnnnnnnnnnnnnnnnnnnnnnnnnnnnnnnnnnnnnnnnnnnnnnnnnnnnnnnnnnnnnnnnnnnnnnnnnnnnnnnnnnnnnnnnnnnnnnnnnnnnnnnnnnnnnnnnnnnnnnnnnnnnnnnnnnnnnnnnnnnnnnnnnnnnnnnnnnnnnnnnnnnnnnnnnnnnnnnnnnnnnnnnnnnnnnnnnnnnnnnnnnnnnnnnnnnnnnnnnnnnnnnnnnnnnnnnnnnnnnnnnnnnnnnnnnnnnnnnnnnnnnnnnnnnnnnnnnnnnnnnnnnnnnnnnnnnnnnnnnnnnnnnnnnnnnnnnnnnnnnnnnnnnnnnnnnnnnnnnnnnnnnnnnnnnnnnnnnnnnnnnnnnnnnnnnnnnnnnnnnnnnnnnnnnnnnnnnnnnnnnnnnnnnnnnnnnnnnnnnnnnnnnnnnnnnnnnnnnnnnnnnnnnnnnnnnnnnnnnnnnnnnnnnnnnnnnnnnnnnnnnnnnnnnnnnnnnnnnnnnnnnnnnnnnnnnnnnnnnnnnnnnnnnnnnnnnnnnnnnnnnnnnnnnnnnnnnnnnnnnnnnnnnnnnnnnnnnnnnnnnnnnnnnnnnnnnnnnnnnnnnnnnnnnnnnnnnnnnnnnnnnnnnnnnnnnnnnnnnnnnnnnnnnnnnnnnnnnnnnnnnnnnnnnnnnnnnnnnnnnnnnnnnnnnnnnnnnnnnnnnnnnnnnnnnnnnnnnnnnnnnnnnnnnnnnnnnnnnnnnnnnnnnnnnnnnnnnnnnnnnnnnnnnnnnnnnnnnnnnnnnnnnnnnnnnnnnnnnnnnnnnnnnnnnnnnnnnnnnnnnnnnnnnnnnnnnnnnnnnnnnnnnnnnnnnnnnnnnnnnnnnnnnnnnnnnnnnnnnnnnnnnnnnnnnnnnnnnnnnnnnnnnnnnnnnnnnnnnnnnnnnnnnnnnnnnnnnnnnnnnnnnnnnnnnnnnnnnnnnnnnnnnnnnnnnnnnnnnnnnnnnnnnnnnnnnnnnnnnnnnnnnnnnnnnnnnnnnnnnnnnnnnnnnnnnnnnnnnnnnnnnnnnnnnnnnnnnnnnnnnnnnnnnnnnnnnnnnnnnnnnnnnnnnnnnnnnnnnnnnnnnnnnnnnnnnnnnnnnnnnnnnnnnnnnnnnnnnnnnnnnnnnnnnnnnnnnnnnnnnnnnnnnnnnnnnnnnnnnnnnnnnnnnnnnnnnnnnnnnnnnnnnnnnnnnnnnnnnnnnnnnnnnnnnnnnnnnnnnnnnnnnnnnnnnnnnnnnnnnnnnnnnnnnnnnnnnnnnnnnnnnnnnnnnnnnnnnnnnnnnnnnnnnnnnnnnnnnnnnnnnnnnnnnnnnnnnnnnnnnnnnnnnnnnnnnnnnnnnnnnnnnnnnnnnnnnnnnnnnnnnnnnnnnnnnnnnnnnnnnnnnnnnnnnnnnnnnnnnnnnnnnnnnnnnnnnnnnnnnnnnnnnnnnnnnnnnnnnnnnnnnnnnnnnnnnnnnnnnnnnnnnnnnnnnnnnnnnnnnnnnnnnnnnnnnnnnnnnnnnnnnnnnnnnnnnnnnnnnnnnnnnnnnnnnnnnnnnnnnnnnnnnnnnnnnnnnnnnnnnnnnnnnnnnnnnnnnnnnnnnnnnnnnnnnnnnnnnnnnnnnnnnnnnnnnnnnnnnnnnnnnnnnnnnnnnnnnnnnnnnnnnnnnnnnnnnnnnnnnnnnnnnnnnnnnnnnnnnnnnnnnnnnnnnnnnnnnnnnnnnnnnnnnnnnnnnnnnnnnnnnnnnnnnnnnnnnnnnnnnnnnnnnnnnnnnnnnnnnnnnnnnnnnnnnnnnnnnnnnnnnnnnnnnnnnnnnnnnnnnnnnnnnnnnnnnnnnnnnnnnnnnnnnnnnnnnnnnnnnnnnnnnnnnnnnnnnnnnnnnnnnnnnnnnnnnnnnnnnnnnnnnnnnnnnnnnnnnnnnnnnnnnnnnnnnnnnnnnnnnnnnnnnnnnnnnnnnnnnnnnnnnnnnnnnnnnnnnnnnnnnnnnnnnnnnnnnnnnnnnnnnnnnnnnnnnnnnnnnnnnnnnnnnnnnnnnnnnnnnnnnnnnnnnnnnnnnnnnnnnnnnnnnnnnnnnnnnnnnnnnnnnnnnnnnnnnnnnnnnnnnnnnnnnnnnnnnnnnnnnnnnnnnnnnnnnnnnnnnnnnnnnnnnnnnnnnnnnnnnnnnnnnnnnnnnnnnnnnnnnnnnnnnnnnnnnnnnnnnnnnnnnnnnnnnnnnnnnnnnnnnnnnnnnnnnnnnnnnnnnnnnnnnnnnnnnnnnnnnnnnnnnnnnnnnnnnnnnnnnnnnnnnnnnnnnnnnnnnnnnnnnnnnnnnnnnnnnnnnnnnnnnnnnnnnnnnnnnnnnnnnnnnnnnnnnnnnnnnnnnnnnnnnnnnnnnnnnnnnnnnnnnnnnnnnnnnnnnnnnnnnnnnnnnnnnnnnnnnnnnnnnnnnnnnnnnnnnnnnnnnnnnnnnnnnnnnnnnnnnnnnnnnnnnnnnnnnnnnnnnnnnnnnnnnnnnnnnnnnnnnnnnnnnnnnnnnnnnnnnnnnnnnnnnnnnnnnnnnnnnnnnnnnnnnnnnnnnnnnnnnnnnnnnnnnnnnnnnnnnnnnnnnnnnnnnnnnnnnnnnnnnnnnnnnnnnnnnnnnnnnnnnnnnnnnnnnnnnnnnnnnnnnnnnnnnnnnnnnnnnnnnnnnnnnnnnnnnnnnnnnnnnnnnnnnnnnnnnnnnnnnnnnnnnnnnnnnnnnnnnnnnnnnnnnnnnnnnnnnnnnnnnnnnnnnnnnnnnnnnnnnnnnnnnnnnnnnnnnnnnnnnnnnnnnnnnnnnnnnnnnnnnnnnnnnnnnnnnnnnnnnnnnnnnnnnnnnnnnnnnnnnnnnnnnnnnnnnnnnnnnnnnnnnnnnnnnnnnnnnnnnnnnnnnnnnnnnnnnnnnnnnnnnnnnnnnnnnnnnnnnnnnnnnnnnnnnnnnnnnnnnnnnnnnnnnnnnnnnnnnnnnnnnnnnnnnnnnnnnnnnnnnnnnnnnnnnnnnnnnnnnnnnnnnnnnnnnnnnnnnnnnnnnnnnnnnnnnnnnnnnnnnnnnnnnnnnnnnnnnnnnnnnnnnnnnnnnnnnnnnnnnnnnnnnnnnnnnnnnnnnnnnnnnnnnnnnnnnnnnnnnnnnnnnnnnnnnnnnnnnnnnnnnnnnnnnnnnnnnnnnnnnnnnnnnnnnnnnnnnnnnnnnnnnnnnnnnnnnnnnnnnnnnnnnnnnnnnnnnnnnnnnnnnnnnnnnnnnnnnnnnnnnnnnnnnnnnnnnnnnnnnnnnnnnnnnnnnnnnnnnnnnnnnnnnnnnnnnnnnnnnnnnnnnnnnnnnnnnnnnnnnnnnnnnnnnnnnnnnnnnnnnnnnnnnnnnnnnnnnnnnnnnnnnnnnnnnnnnnnnnnnnnnnnnnnnnnnnnnnnnnnnnnnnnnnnnnnnnnnnnnnnnnnnnnnnnnnnnnnnnnnnnnnnnnnnnnnnnnnnnnnnnnnnnnnnnnnnnnnnnnnnnnnnnnnnnnnnnnnnnnnnnnnnnnnnnnnnnnnnnnnnnnnnnnnnnnnnnnnnnnnnnnnnnnnnnnnnnnnnnnnnnnnnnnnnnnnnnnnnnnnnnnnnnnnnnnnnnnnnnnnnnnnnnnnnnnnnnnnnnnnnnnnnnnnnnnnnnnnnnnnnnnnnnnnnnnnnnnnnnnnnnnnnnnnnnnnnnnnnnnnnnnnnnnnnnnnnnnnnnnnnnnnnnnnnnnnnnnnnnnnnnnnnnnnnnnnnnnnnnnnnnnnnnnnnnnnnnnnnnnnnnnnnnnnnnnnnnnnnnnnnnnnnnnnnnnnnnnnnnnnnnnnnnnnnnnnnnnnnnnnnnnnnnnnnnnnnnnnnnnnnnnnnnnnnnnnnnnnnnnnnnnnnnnnnnnnnnnnnnnnnnnnnnnnnnnnnnnnnnnnnnnnnnnnnnnnnnnnnnnnnnnnnnnnnnnnnnnnnnnnnnnnnnnnnnnnnnnnnnnnnnnnnnnnnnnnnnnnnnnnnnnnnnnnnnnnnnnnnnnnnnnnnnnnnnnnnnnnnnnnnnnnnnnnnnnnnnnnnnnnnnnnnnnnnnnnnnnnnnnnnnnnnnnnnnnnnnnnnnnnnnnnnnnnnnnnnnnnnnnnnnnnnnnnnnnnnnnnnnnnnnnnnnnnnnnnnnnnnnnnnnnnnnnnnnnnnnnnnnnnnnnnnnnnnnnnnnnnnnnnnnnnnnnnnnnnnnnnnnnnnnnnnnnnnnnnnnnnnnnnnnnnnnnnnnnnnnnnnnnnnnnnnnnnnnnnnnnnnnnnnnnnnnnnnnnnnnnnnnnnnnnnnnnnnnnnnnnnnnnnnnnnnnnnnnnnnnnnnnnnnnnnnnnnnnnnnnnnnnnnnnnnnnnnnnnnnnnnnnnnnnnnnnnnnnnnnnnnnnnnnnnnnnnnnnnnnnnnnnnnnnnnnnnnnnnnnnnnnnnnnnnnnnnnnnnnnnnnnnnnnnnnnnnnnnnnnnnnnnnnnnnnnnnnnnnnnnnnnnnnnnnnnnnnnnnnnnnnnnnnnnnnnnnnnnnnnnnnnnnnnnnnnnnnnnnnnnnnnnnnnnnnnnnnnnnnnnnnnnnnnnnnnnnnnnnnnnnnnnnnnnnnnnnnnnnnnnnnnnnnnnnnnnnnnnnnnnnnnnnnnnnnnnnnnnnnnnnnnnnnnnnnnnnnnnnnnnnnnnnnnnnnnnnnnnnnnnnnnnnnnnnnnnnnnnnnnnnnnnnnnnnnnnnnnnnnnnnnnnnnnnnnnnnnnnnnnnnnnnnnnnnnnnnnnnnnnnnnnnnnnnnnnnnnnnnnnnnnnnnnnnnnnnnnnnnnnnnnnnnnnnnnnnnnnnnnnnnnnnnnnnnnnnnnnnnnnnnnnnnnnnnnnnnnnnnnnnnnnnnnnnnnnnnnnnnnnnnnnnnnnnnnnnnnnnnnnnnnnnnnnnnnnnnnnnnnnnnnnnnnnnnnnnnnnnnnnnnnnnnnnnnnnnnnnnnnnnnnnnnnnnnnnnnnnnnnnnnnnnnnnnnnnnnnnnnnnnnnnnnnnnnnnnnnnnnnnnnnnnnnnnnnnnnnnnnnnnnnnnnnnnnnnnnnnnnnnnnnnnnnnnnnnnnnnnnnnnnnnnnnnnnnnnnnnnnnnnnnnnnnnnnnnnnnnnnnnnnnnnnnnnnnnnnnnnnnnnnnnnnnnnnnnnnnnnnnnnnnnnnnnnnnnnnnnnnnnnnnnnnnnnnnnnnnnnnnnnnnnnnnnnnnnnnnnnnnnnnnnnnnnnnnnnnnnnnnnnnnnnnnnnnnnnnnnnnnnnnnnnnnnnnnnnnnnnnnnnnnnnnnnnnnnnnnnnnnnnnnnnnnnnnnnnnnnnnnnnnnnnnnnnnnnnnnnnnnnnnnnnnnnnnnnnnnnnnnnnnnnnnnnnnnnnnnnnnnnnnnnnnnnnnnnnnnnnnnnnnnnnnnnnnnnnnnnnnnnnnnnnnnnnnnnnnnnnnnnnnnnnnnnnnnnnnnnnnnnnnnnnnnnnnnnnnnnnnnnnnnnnnnnnnnnnnnnnnnnnnnnnnnnnnnnnnnnnnnnnnnnnnnnnnnnnnnnnnnnnnnnnnnnnnnnnnnnnnnnnnnnnnnnnnnnnnnnnnnnnnnnnnnnnnnnnnnnnnnnnnnnnnnnnnnnnnnnnnnnnnnnnnnnnnnnnnnnnnnnnnnnnnnnnnnnnnnnnnnnnnnnnnnnnnnnnnnnnnnnnnnnnnnnnnnnnnnnnnnnnnnnnnnnnnnnnnnnnnnnnnnnnnnnnnnnnnnnnnnnnnnnnnnnnnnnnnnnnnnnnnnnnnnnnnnnnnnnnnnnnnnnnnnnnnnnnnnnnnnnnnnnnnnnnnnnnnnnnnnnnnnnnnnnnnnnnnnnnnnnnnnnnnnnnnnnnnnnnnnnnnnnnnnnnnnnnnnnnnnnnnnnnnnnnnnnnnnnnnnnnnnnnnnnnnnnnnnnnnnnnnnnnnnnnnnnnnnnnnnnnnnnnnnnnnnnnnnnnnnnnnnnnnnnnnnnnnnnnnnnnnnnnnnnnnnnnnnnnnnnnnnnnnnnnnnnnnnnnnnnnnnnnnnnnnnnnnnnnnnnnnnnnnnnnnnnnnnnnnnnnnnnnnnnnnnnnnnnnnnnnnnnnnnnnnnnnnnnnnnnnnnnnnnnnnnnnnnnnnnnnnnnnnnnnnnnnnnnnnnnnnnnnnnnnnnnnnnnnnnnnnnnnnnnnnnnnnnnnnnnnnnnnnnnnnnnnnnnnnnnnnnnnnnnnnnnnnnnnnnnnnnnnnnnnnnnnnnnnnnnnnnnnnnnnnnnnnnnnnnnnnnnnnnnnnnnnnnnnnnnnnnnnnnnnnnnnnnnnnnnnnnnnnnnnnnnnnnnnnnnnnnnnnnnnnnnnnnnnnnnnnnnnnnnnnnnnnnnnnnnnnnnnnnnnnnnnnnnnnnnnnnnnnnnnnnnnnnnnnnnnnnnnnnnnnnnnnnnnnnnnnnnnnnnnnnnnnnnnnnnnnnnnnnnnnnnnnnnnnnnnnnnnnnnnnnnnnnnnnnnnnnnnnnnnnnnnnnnnnnnnnnnnnnnnnnnnnnnnnnnnnnnnnnnnnnnnnnnnnnnnnnnnnnnnnnnnnnnnnnnnnnnnnnnnnnnnnnnnnnnnnnnnnnnnnnnnnnnnnnnnnnnnnnnnnnnnnnnnnnnnnnnnnnnnnnnnnnnnnnnnnnnnnnnnnnnnnnnnnnnnnnnnnnnnnnnnnnnnnnnnnnnnnnnnnnnnnnnnnnnnnnnnnnnnnnnnnnnnnnnnnnnnnnnnnnnnnnnnnnnnnnnnnnnnnnnnnnnnnnnnnnnnnnnnnnnnnnnnnnnnnnnnnnnnnnnnnnnnnnnnnnnnnnnnnnnnnnnnnnnnnnnnnnnnnnnnnnnnnnnnnnnnnnnnnnnnnnnnnnnnnnnnnnnnnnnnnnnnnnnnnnnnnnnnnnnnnnnnnnnnnnnnnnnnnnnnnnnnnnnnnnnnnnnnnnnnnnnnnnnnnnnnnnnnnnnnnnnnnnnnnnnnnnnnnnnnnnnnnnnnnnnnnnnnnnnnnnnnnnnnnnnnnnnnnnnnnnnnnnnnnnnnnnnnnnnnnnnnnnnnnnnnnnnnnnnnnnnnnnnnnnnnnnnnnnnnnnnnnnnnnnnnnnnnnnnnnnnnnnnnnnnnnnnnnnnnnnnnnnnnnnnnnnnnnnnnnnnnnnnnnnnnnnnnnnnnnnnnnnnnnnnnnnnnnnnnnnnnnnnnnnnnnnnnnnnnnnnnnnnnnnnnnnnnnnnnnnnnnnnnnnnnnnnnnnnnnnnnnnnnnnnnnnnnnnnnnnnnnnnnnnnnnnnnnnnnnnnnnnnnnnnnnnnnnnnnnnnnnnnnnnnnnnnnnnnnnnnnnnnnnnnnnnnnnnnnnnnnnnnnnnnnnnnnnnnnnnnnnnnnnnnnnnnnnnnnnnnnnnnnnnnnnnnnnnnnnnnnnnnnnnnnnnnnnnnnnnnnnnnnnnnnnnnnnnnnnnnnnnnnnnnnnnnnnnnnnnnnnnnnnnnnnnnnnnnnnnnnnnnnnnnnnnnnnnnnnnnnnnnnnnnnnnnnnnnnnnnnnnnnnnnnnnnnnnnnnnnnnnnnnnnnnnnnnnnnnnnnnnnnnnnnnnnnnnnnnnnnnnnnnnnnnnnnnnnnnnnnnnnnnnnnnnnnnnnnnnnnnnnnnnnnnnnnnnnnnnnnnnnnnnnnnnnnnnnnnnnnnnnnnnnnnnnnnnnnnnnnnnnnnnnnnnnnnnnnnnnnnnnnnnnnnnnnnnnnnnnnnnnnnnnnnnnnnnnnnnnnnnnnnnnnnnnnnnnnnnnnnnnnnnnnnnnnnnnnnnnnnnnnnnnnnnnnnnnnnnnnnnnnnnnnnnnnnnnnnnnnnnnnnnnnnnnnnnnnnnnnnnnnnnnnnnnnnnnnnnnnnnnnnnnnnnnnnnnnnnnnnnnnnnnnnnnnnnnnnnnnnnnnnnnnnnnnnnnnnnnnnnnnnnnnnnnnnnnnnnnnnnnnnnnnnnnnnnnnnnnnnnnnnnnnnnnnnnnnnnnnnnnnnnnnnnnnnnnnnnnnnnnnnnnnnnnnnnnnnnnnnnnnnnnnnnnnnnnnnnnnnnnnnnnnnnnnnnnnnnnnnnnnnnnnnnnnnnnnnnnnnnnnnnnnnnnnnnnnnnnnnnnnnnnnnnnnnnnnnnnnnnnnnnnnnnnnnnnnnnnnnnnnnnnnnnnnnnnnnnnnnnnnnnnnnnnnnnnnnnnnnnnnnnnnnnnnnnnnnnnnnnnnnnnnnnnnnnnnnnnnnnnnnnnnnnnnnnnnnnnnnnnnnnnnnnnnnnnnnnnnnnnnnnnnnnnnnnnnnnnnnnnnnnnnnnnnnnnnnnnnnnnnnnnnnnnnnnnnnnnnnnnnnnnnnnnnnnnnnnnnnnnnnnnnnnnnnnnnnnnnnnnnnnnnnnnnnnnnnnnnnnnnnnnnnnnnnnnnnnnnnnnnnnnnnnnnnnnnnnnnnnnnnnnnnnnnnnnnnnnnnnnnnnnnnnnnnnnnnnnnnnnnnnnnnnnnnnnnnnnnnnnnnnnnnnnnnnnnnnnnnnnnnnnnnnnnnnnnnnnnnnnnnnnnnnnnnnnnnnnnnnnnnnnnnnnnnnnnnnnnnnnnnnnnnnnnnnnnnnnnnnnnnnnnnnnnnnnnnnnnnnnnnnnnnnnnnnnnnnnnnnnnnnnnnnnnnnnnnnnnnnnnnnnnnnnnnnnnnnnnnnnnnnnnnnnnnnnnnnnnnnnnnnnnnnnnnnnnnnnnnnnnnnnnnnnnnnnnnnnnnnnnnnnnnnnnnnnnnnnnnnnnnnnnnnnnnnnnnnnnnnnnnnnnnnnnnnnnnnnnnnnnnnnnnnnnnnnnnnnnnnnnnnnnnnnnnnnnnnnnnnnnnnnnnnnnnnnnnnnnnnnnnnnnnnnnnnnnnnnnnnnnnnnnnnnnnnnnnnnnnnnnnnnnnnnnnnnnnnnnnnnnnnnnnnnnnnnnnnnnnnnnnnnnnnnnnnnnnnnnnnnnnnnnnnnnnnnnnnnnnnnnnnnnnnnnnnnnnnnnnnnnnnnnnnnnnnnnnnnnnnnnnnnnnnnnnnnnnnnnnnnnnnnnnnnnnnnnnnnnnnnnnnnnnnnnnnnnnnnnnnnnnnnnnnnnnnnnnnnnnnnnnnnnnnnnnnnnnnnnnnnnnnnnnnnnnnnnnnnnnnnnnnnnnnnnnnnnnnnnnnnnnnnnnnnnnnnnnnnnnnnnnnnnnnnnnnnnnnnnnnnnnnnnnnnnnnnnnnnnnnnnnnnnnnnnnnnnnnnnnnnnnnnnnnnnnnnnnnnnnnnnnnnnnnnnnnnnnnnnnnnnnnnnnnnnnnnnnnnnnnnnnnnnnnnnnnnnnnnnnnnnnnnnnnnnnnnnnnnnnnnnnnnnnnnnnnnnnnnnnnnnnnnnnnnnnnnnnnnnnnnnnnnnnnnnnnnnnnnnnnnnnnnnnnnnnnnnnnnnnnnnnnnnnnnnnnnnnnnnnnnnnnnnnnnnnnnnnnnnnnnnnnnnnnnnnnnnnnnnnnnnnnnnnnnnnnnnnnnnnnnnnnnnnnnnnnnnnnnnnnnnnnnnnnnnnnnnnnnnnnnnnnnnnnnnnnnnnnnnnnnnnnnnnnnnnnnnnnnnnnnnnnnnnnnnnnnnnnnnnnnnnnnnnnnnnnnnnnnnnnnnnnnnnnnnnnnnnnnnnnnnnnnnnnnnnnnnnnnnnnnnnnnnnnnnnnnnnnnnnnnnnnnnnnnnnnnnnnnnnnnnnnnnnnnnnnnnnnnnnnnnnnnnnnnnnnnnnnnnnnnnnnnnnnnnnnnnnnnnnnnnnnnnnnnnnnnnnnnnnnnnnnnnnnnnnnnnnnnnnnnnnnnnnnnnnnnnnnnnnnnnnnnnnnnnnnnnnnnnnnnnnnnnnnnnnnnnnnnnnnnnnnnnnnnnnnnnnnnnnnnnnnnnnnnnnnnnnnnnnnnnnnnnnnnnnnnnnnnnnnnnnnnnnnnnnnnnnnnnnnnnnnnnnnnnnnnnnnnnnnnnnnnnnnnnnnnnnnnnnnnnnnnnnnnnnnnnnnnnnnnnnnnnnnnnnnnnnnnnnnnnnnnnnnnnnnnnnnnnnnnnnnnnnnnnnnnnnnnnnnnnnnnnnnnnnnnnnnnnnnnnnnnnnnnnnnnnnnnnnnnnnnnnnnnnnnnnnnnnnnnnnnnnnnnnnnnnnnnnnnnnnnnnnnnnnnnnnnnnnnnnnnnnnnnnnnnnnnnnnnnnnnnnnnnnnnnnnnnnnnnnnnnnnnnnnnnnnnnnnnnnnnnnnnnnnnnnnnnnnnnnnnnnnnnnnnnnnnnnnnnnnnnnnnnnnnnnnnnnnnnnnnnnnnnnnnnnnnnnnnnnnnnnnnnnnnnnnnnnnnnnnnnnnnnnnnnnnnnnnnnnnnnnnnnnnnnnnnnnnnnnnnnnnnnnnnnnnnnnnnnnnnnnnnnnnnnnnnnnnnnnnnnnnnnnnnnnnnnnnnnnnnnnnnnnnnnnnnnnnnnnnnnnnnnnnnnnnnnnnnnnnnnnnnnnnnnnnnnnnnnnnnnnnnnnnnnnnnnnnnnnnnnnnnnnnnnnnnnnnnnnnnnnnnnnnnnnnnnnnnnnnnnnnnnnnnnnnnnnnnnnnnnnnnnnnnnnnnnnnnnnnnnnnnnnnnnnnnnnnnnnnnnnnnnnnnnnnnnnnnnnnnnnnnnnnnnnnnnnnnnnnnnnnnnnnnnnnnnnnnnnnnnnnnnnnnnnnnnnnnnnnnnnnnnnnnnnnnnnnnnnnnnnnnnnnnnnnnnnnnnnnnnnnnnnnnnnnnnnnnnnnnnnnnnnnnnnnnnnnnnnnnnnnnnnnnnnnnnnnnnnnnnnnnnnnnnnnnnnnnnnnnnnnnnnnnnnnnnnnnnnnnnnnnnnnnnnnnnnnnnnnnnnnnnnnnnnnnnnnnnnnnnnnnnnnnnnnnnnnnnnnnnnnnnnnnnnnnnnnnnnnnnnnnnnnnnnnnnnnnnnnnnnnnnnnnnnnnnnnnnnnnnnnnnnnnnnnnnnnnnnnnnnnnnnnnnnnnnnnnnnnnnnnnnnnnnnnnnnnnnnnnnnnnnnnnnnnnnnnnnnnnnnnnnnnnnnnnnnnnnnnnnnnnnnnnnnnnnnnnnnnnnnnnnnnnnnnnnnnnnnnnnnnnnnnnnnnnnnnnnnnnnnnnnnnnnnnnnnnnnnnnnnnnnnnnnnnnnnnnnnnnnnnnnnnnnnnnnnnnnnnnnnnnnnnnnnnnnnnnnnnnnnnnnnnnnnnnnnnnnnnnnnnnnnnnnnnnnnnnnnnnnnnnnnnnnnnnnnnnnnnnnnnnnnnnnnnnnnnnnnnnnnnnnnnnnnnnnnnnnnnnnnnnnnnnnnnnnnnnnnnnnnnnnnnnnnnnnnnnnnnnnnnnnnnnnnnnnnnnnnnnnnnnnnnnnnnnnnnnnnnnnnnnnnnnnnnnnnnnnnnnnnnnnnnnnnnnnnnnnnnnnnnnnnnnnnnnnnnnnnnnnnnnnnnnnnnnnnnnnnnnnnnnnnnnnnnnnnnnnnnnnnnnnnnnnnnnnnnnnnnnnnnnnnnnnnnnnnnnnnnnnnnnnnnnnnnnnnnnnnnnnnnnnnnnnnnnnnnnnnnnnnnnnnnnnnnnnnnnnnnnnnnnnnnnnnnnnnnnnnnnnnnnnnnnnnnnnnnnnnnnnnnnnnnnnnnnnnnnnnnnnnnnnnnnnnnnnnnnnnnnnnnnnnnnnnnnnnnnnnnnnnnnnnnnnnnnnnnnnnnnnnnnnnnnnnnnnnnnnnnnnnnnnnnnnnnnnnnnnnnnnnnnnnnnnnnnnnnnnnnnnnnnnnnnnnnnnnnnnnnnnnnnnnnnnnnnnnnnnnnnnnnnnnnnnnnnnnnnnnnnnnnnnnnnnnnnnnnnnnnnnnnnnnnnnnnnnnnnnnnnnnnnnnnnnnnnnnnnnnnnnnnnnnnnnnnnnnnnnnnnnnnnnnnnnnnnnnnnnnnnnnnnnnnnnnnnnnnnnnnnnnnnnnnnnnnnnnnnnnnnnnnnnnnnnnnnnnnnnnnnnnnnnnnnnnnnnnnnnnnnnnnnnnnnnnnnnnnnnnnnnnnnnnnnnnnnnnnnnnnnnnnnnnnnnnnnnnnnnnnnnnnnnnnnnnnnnnnnnnnnnnnnnnnnnnnnnnnnnnnnnnnnnnnnnnnnnnnnnnnnnnnnnnnnnnnnnnnnnnnnnnnnnnnnnnnnnnnnnnnnnnnnnnnnnnnnnnnnnnnnnnnnnnnnnnnnnnnnnnnnnnnnnnnnnnnnnnnnnnnnnnnnnnnnnnnnnnnnnnnnnnnnnnnnnnnnnnnnnnnnnnnnnnnnnnnnnnnnnnnnnnnnnnnnnnnnnnnnnnnnnnnnnnnnnnnnnnnnnnnnnnnnnnnnnnnnnnnnnnnnnnnnnnnnnnnnnnnnnnnnnnnnnnnnnnnnnnnnnnnnnnnnnnnnnnnnnnnnnnnnnnnnnnnnnnnnnnnnnnnnnnnnnnnnnnnnnnnnnnnnnnnnnnnnnnnnnnnnnnnnnnnnnnnnnnnnnnnnnnnnnnnnnnnnnnnnnnnnnnnnnnnnnnnnnnnnnnnnnnnnnnnnnnnnnnnnnnnnnnnnnnnnnnnnnnnnnnnnnnnnnnnnnnnnnnnnnnnnnnnnnnnnnnnnnnnnnnnnnnnnnnnnnnnnnnnnnnnnnnnnnnnnnnnnnnnnnnnnnnnnnnnnnnnnnnnnnnnnnnnnnnnnnnnnnnnnnnnnnnnnnnnnnnnnnnnnnnnnnnnnnnnnnnnnnnnnnnnnnnnnnnnnnnnnnnnnnnnnnnnnnnnnnnnnnnnnnnnnnnnnnnnnnnnnnnnnnnnnnnnnnnnnnnnnnnnnnnnnnnnnnnnnnnnnnnnnnnnnnnnnnnnnnnnnnnnnnnnnnnnnnnnnnnnnnnnnnnnnnnnnnnnnnnnnnnnnnnnnnnnnnnnnnnnnnnnnnnnnnnnnnnnnnnnnnnnnnnnnnnnnnnnnnnnnnnnnnnnnnnnnnnnnnnnnnnnnnnnnnnnnnnnnnnnnnnnnnnnnnnnnnnnnnnnnnnnnnnnnnnnnnnnnnnnnnnnnnnnnnnnnnnnnnnnnnnnnnnnnnnnnnnnnnnnnnnnnnnnnnnnnnnnnnnnnnnnnnnnnnnnnnnnnnnnnnnnnnnnnnnnnnnnnnnnnnnnnnnnnnnnnnnnnnnnnnnnnnnnnnnnnnnnnnnnnnnnnnnnnnnnnnnnnnnnnnnnnnnnnnnnnnnnnnnnnnnnnnnnnnnnnnnnnnnnnnnnnnnnnnnnnnnnnnnnnnnnnnnnnnnnnnnnnnnnnnnnnnnnnnnnnnnnnnnnnnnnnnnnnnnnnnnnnnnnnnnnnnnnnnnnnnnnnnnnnnnnnnnnnnnnnnnnnnnnnnnnnnnnnnnnnnnnnnnnnnnnnnnnnnnnnnnnnnnnnnnnnnnnnnnnnnnnnnnnnnnnnnnnnnnnnnnnnnnnnnnnnnnnnnnnnnnnnnnnnnnnnnnnnnnnnnnnnnnnnnnnnnnnnnnnnnnnnnnnnnnnnnnnnnnnnnnnnnnnnnnnnnnnnnnnnnnnnnnnnnnnnnnnnnnnnnnnnnnnnnnnnnnnnnnnnnnnnnnnnnnnnnnnnnnnnnnnnnnnnnnnnnnnnnnnnnnnnnnnnnnnnnnnnnnnnnnnnnnnnnnnnnnnnnnnnnnnnnnnnnnnnnnnnnnnnnnnnnnnnnnnnnnnnnnnnnnnnnnnnnnnnnnnnnnnnnnnnnnnnnnnnnnnnnnnnnnnnnnnnnnnnnnnnnnnnnnnnnnnnnnnnnnnnnnnnnnnnnnnnnnnnnnnnnnnnnnnnnnnnnnnnnnnnnnnnnnnnnnnnnnnnnnnnnnnnnnnnnnnnnnnnnnnnnnnnnnnnnnnnnnnnnnnnnnnnnnnnnnnnnnnnnnnnnnnnnnnnnnnnnnnnnnnnnnnnnnnnnnnnnnnnnnnnnnnnnnnnnnnnnnnnnnnnnnnnnnnnnnnnnnnnnnnnnnnnnnnnnnnnnnnnnnnnnnnnnnnnnnnnnnnnnnnnnnnnnnnnnnnnnnnnnnnnnnnnnnnnnnnnnnnnnnnnnnnnnnnnnnnnnnnnnnnnnnnnnnnnnnnnnnnnnnnnnnnnnnnnnnnnnnnnnnnnnnnnnnnnnnnnnnnnnnnnnnnnnnnnnnnnnnnnnnnnnnnnnnnnnnnnnnnnnnnnnnnnnnnnnnnnnnnnnnnnnnnnnnnnnnnnnnnnnnnnnnnnnnnnnnnnnnnnnnnnnnnnnnnnnnnnnnnnnnnnnnnnnnnnnnnnnnnnnnnnnnnnnnnnnnnnnnnnnnnnnnnnnnnnnnnnnnnnnnnnnnnnnnnnnnnnnnnnnnnnnnnnnnnnnnnnnnnnnnnnnnnnnnnnnnnnnnnnnnnnnnnnnnnnnnnnnnnnnnnnnnnnnnnnnnnnnnnnnnnnnnnnnnnnnnnnnnnnnnnnnnnnnnnnnnnnnnnnnnnnnnnnnnnnnnnnnnnnnnnnnnnnnnnnnnnnnnnnnnnnnnnnnnnnnnnnnnnnnnnnnnnnnnnnnnnnnnnnnnnnnnnnnnnnnnnnnnnnnnnnnnnnnnnnnnnnnnnnnnnnnnnnnnnnnnnnnnnnnnnnnnnnnnnnnnnnnnnnnnnnnnnnnnnnnnnnnnnnnnnnnnnnnnnnnnnnnnnnnnnnnnnnnnnnnnnnnnnnnnnnnnnnnnnnnnnnnnnnnnnnnnnnnnnnnnnnnnnnnnnnnnnnnnnnnnnnnnnnnnnnnnnnnnnnnnnnnnnnnnnnnnnnnnnnnnnnnnnnnnnnnnnnnnnnnnnnnnnnnnnnnnnnnnnnnnnnnnnnnnnnnnnnnnnnnnnnnnnnnnnnnnnnnnnnnnnnnnnnnnnnnnnnnnnnnnnnnnnnnnnnnnnnnnnnnnnnnnnnnnnnnnnnnnnnnnnnnnnnnnnnnnnnnnnnnnnnnnnnnnnnnnnnnnnnnnnnnnnnnnnnnnnnnnnnnnnnnnnnnnnnnnnnnnnnnnnnnnnnnnnnnnnnnnnnnnnnnnnnnnnnnnnnnnnnnnnnnnnnnnnnnnnnnnnnnnnnnnnnnnnnnnnnnnnnnnnnnnnnnnnnnnnnnnnnnnnnnnnnnnnnnnnnnnnnnnnnnnnnnnnnnnnnnnnnnnnnnnnnnnnnnnnnnnnnnnnnnnnnnnnnnnnnnnnnnnnnnnnnnnnnnnnnnnnnnnnnnnnnnnnnnnnnnnnnnnnnnnnnnnnnnnnnnnnnnnnnnnnnnnnnnnnnnnnnnnnnnnnnnnnnnnnnnnnnnnnnnnnnnnnnnnnnnnnnnnnnnnnnnnnnnnnnnnnnnnnnnnnnnnnnnnnnnnnnnnnnnnnnnnnnnnnnnnnnnnnnnnnnnnnnnnnnnnnnnnnnnnnnnnnnnnnnnnnnnnnnnnnnnnnnnnnnnnnnnnnnnnnnnnnnnnnnnnnnnnnnnnnnnnnnnnnnnnnnnnnnnnnnnnnnnnnnnnnnnnnnnnnnnnnnnnnnnnnnnnnnnnnnnnnnnnnnnnnnnnnnnnnnnnnnnnnnncattttcgatgtgctgctggtttcagtttgccagtattttattgaggatttttacatcgatgttcatgagggatattggcctgaaatttttgttgcggttgtgtctttgcgaggttttggtatcattatgatggtgacctcataaaatgaattagggaggagtccctccttttcaattgtttagaatagtttaagaagaaatgttaccagctgctctttatgcttctggtaaaattcggctgtgaatccatctggttctgagcgtttttttattggtaggctattaattactgcctcaatttcagaactttttattggtctattcagggattcaacttcttcctggcttagtcttgggaaagtgtatgtgtccagaaatttatccatttcttctatattttctagttgatttgtgtggagatgtctatagtattctctcatggtagtttttatttctgtggaatcagtggtgatatcctgtttatcattttttaatgtgtctatttgtttcttctttcttttcttctttattaatctagctagtggtccgtctcttttgttaatcttttcaaaaaaccagctagtggagtcattgattttgaacagtttttcttgtctctatctccttcagttctgctctgatcttagttgtttctttccttcagctagtttttgaatttgtttcctcttgattctctagttgttttaattgtgatgttagggtgtcgatttcagatcattccagctttctgttgtgggcatttagtgctagcatatcccctcttaaaactgctttagctgtgtccaagagattctggtacattgtctctttgttctcatttgtttcaaaaaaaacttaatttctctcttaattttgtcatttactcagtagtcgttcaggagcaggttgttcaatttccatgtatttatgtggttttgagtgagtttcttaatcctgagttctgatttgattgcactgtggtctgagagacagtttgttatggttgccattttttccatttgttgaggagtgttttgcttccaattatgtggtcaattttagaatatgtgctatgtggcatggagaagaatgtatattctgttcttctggcatggagagttctgtagttgtctattaggtccgcttagtccagagctgatttcaaatcctgaatatccttgttaattttctgtctcattgatctgtctaatattggcagtggggtgttaaaacttcccagtgttattgtgtgggagtctacgtctctttataggtctgtaagaacttgttttatgaatctcagtgctcctctgttgggtaggtatatatataggatagttagctcttcttgttgcattgatccctttacctttatgtagtgcccttctttgtcttttttcatcttggtttaaagtctgttttacaagaaactaggattgaaaccttgctttttttgttgttgttgttgctttttttgctttccatttgccatttctccttccctttattttaagcctatgtgtgtctttgcatgtgagatgtgtctcctgaatatagcacaccaaagattcttgactgtttaaccaatttgccaggctctgtctcttaattgaggtatttagcccacttatatttatggttaatattgttatgtgtgaatttgatcctgttatcatgatgctagctggttattttgcacattcgttgatgcagttttttcatagtatcgattggtctttatattttggtgtggttttgcagtggtgaaccatattttcctttccatatttagtgtttccttcaggagattttgtaaggcatgcctggtggtgacataatccctcagcatttgcttgtctgtgaaggactttatttcccctttgcttttgaagattagtttggctggatatgaaattctgagttgaaaattattttatttaagaatgttgaatattggcccccactctcttctggcttctagagtttctgcaaagagatctgctgttagtctgatgggcctccatttgtaggtaacctgacttctctctctgtctgcccttaacattatttccttcatttcaaccttggagagtctggcgattatgtgtcttggagttgctcttctcgaggagtatcttagtgatgttctctgtatttcctgaatttgaatgttggcctgtcttgctaggttgaggaagttctcctggataatatcctaaagtttgttttctagcttggatccattcttcccgtcactttgaggtataccaatcaatcgtaggtttggtcttttcacatagtcccatataacttaaaggcattgtttagctccatcaggccatttatgtttctctctaagctggttattctagttagcagttcccataaccttttatcaagatacttagcttctttgcattgtgttagaacatacttctttagctcagaggagtttattattacccaccttctgaagactacttctgtcaattcttcaatctcattctccatccagttttgtgtcattactggagaggtgttgtgatcatttggaggagaaaaggcattcttgtttctggaatttttggcatttttgtgctgttttttcctcatcttcatggatttatctactttcaatctttggggctgatgacatttggatggggttttttttgggtgggtcctttctgttgatgttgatgttgttgctttctgcttgttagtttttcttctaacagcaaggttcttctgcaggtccagtgcagtttgctggagttccaatccagaccctgttcacctgggtgtcaccagtaaaggctgcagaacagcaaagattgctgccttctccttcttctggaaacttcatcccaggaggatacccgcccaatgccaactggagcccttttgtatgaggtgtctgtcaacccctgttaggaggtttctcccagtcaggagtcacggggaacccacttgaggagacagtctgtctcttagcagagctggtgcactgtgctggcagaatccctctagtcaaaatcagctgctctcttcagagccagcaggcaggaatgatgaaatccactgaagctgcacccacagcctccccttcccccatgtgctctgtcccagggagatagaggttttctgtgtaagcctctgactagggctgttacctttccttcaaatatgacctgcccaatgaggaggactctaaagaagcagtctgccacagccactttgctgcacccaacccggaccttccagcctccttggcaccgtcaggggaaaactgtctactaaagcctcagtaatggtggactccactccctccaactgacctcaattggcccaggtcaacttcagactgctgtgctggcagcgagaatttcaggatgaggaacgcattagctgtttgtgattttcatgtctgttgcagggatttgacccattgttagtgctagatttggagtcttaaaaaacagatttatcttactgaactcaaagtacaacttgaagatgtactcagctgtttacttaaattaaagcgggagaaaatgtatctttgcagatctatttttatgtcacttgcttttagacacgagattgtctctggcacagtaattcaacttagtctatgtcaaaaacatagcctgaaaatgctcaaaaaaaattatgaatagcggattgtattctatgtgttctcaaatttcttctatgatgtaaaatatataacataatgttttaccttggatttctaacctcagccctcagccattttcccaatttttttttttttgttttgagacggagtcttgctctgtctctcaggctggagtgcagtggagctatctcggctcactgcaagctccacctcccgtgttcatgccattctcctgcctcagcctcccaagtagctgggactacaggcacctgccaccacgcccgactacttttttgtatttttagtagagacagggtttcaccgtattatccaggatggtctggatctcctgacctcatgattcacccatctcagcctcccaaagtgctgggattacaggcatgagccaccttgccatgccccactttcccaaactattaaaagaccttccaaggtgggtcaaaagcatttttcagagaagattattcctaacagtaaaggataataacagatggataaaaatctcaaataaattatgcctctatttgcagaagcgtcactctccagagtctccaagatccagagaatttccatgaggtagagtagtttatggacatttagcaaagttggtcctgactgctgtctcagcctcttaatagatgtgcagctatagacaatttactggacttagaacagttatataaacctgggctgcaagaaaacggataacactgattgcaagaatggcaaccacttctcattcctctctgatctgggccctctgcaatgtacacttgaggctgcttccatggagggaaagattttcttttcccaaatcttggatctggctggccttatttgctctgcctcattcatactttttgttctaataaaataattaagatgtttagcgtctcatcccagcctttatcttgttaaaactatatcttatgatatgtcatctctctttactatatttggttatattcattctattcaatactcaggtaattttttatctctgtttaatttagtgtttcacctataccttgtcctaatttttttattctttacattctaccgagctgtgattcaaatatgatatttgaatatggaaaatggtggcctagtttttcttcagaaatttctttttatttacttgtgttctttagtttttaacttggttccaatatttgggaaatatcacatttgagatgtctgtagtcatgttatttctgtgcttattccattttcccttggaggaaggtggacagcatacagacttgacatccttgtgatctatcagtatctgaagggaccactttttttcagtttgattacttctctggcttattctcttgatttactttagctttcatcaagtgcttctatatttttaaactgtattcattattttcatagttcttgtagcttcttgagaacttttacttgtctacactaaaatatttaaaaatatgtagccttttcttctgaaagcacaaatatgcagtgtacacatgagtagaatatttcataggcattgggcagcatacaaccacatcttatgagatattccgtttcttcattcaaaacatctctctcaaatatgtagtaatagtcacttgtaaggggtagttcttttgatacttaaaattttcttttatgtgcctttatgaaaatatatacttaactacagagaacagaactctgtgcttccttttagtatgtccttgacctcacaaaaataattcatgaaatcttatatttattttataaattaatttaatgaaacaaaatttgtgcatggctaaatattacttgttgagtacaatttagaatttctactgtcattttagtgtcctaaaagatatgagctgttgaatttctgctctcataaaatgaatgatattgttaggcctaaacccttgccatttattttccccctctgtcatacagtgtgtatctttggttcactgctgaaaaattttattaatttttctctcttgctagtagtcatactttctaataaagttatcattacttgtgtttatttagttactgtatgttaaacatttgatttctgatggtcttaatgtcatttaatataattgtaaatatttcaatttgtcattattaacaaatttctgtattatatgttttagactcagctattaagtatatgtgggtaaatgacttagaataatttctaaaacattgtaggggctactaagtactaataaccctgattcattaaatttttattccttataatattctttattgactaaattattttgtaatcttatttaaatttattcttttcttttctaaatatttgtgaaaaaggggttaggctaatgtgtcattttgataaaacttcatgtcaaatgatatgtttcactggtttcttttagatgtaatagcttttttgactcaggcaatacatgcaagtatgaagtataaaaattatagtctcaatccttaagctgagtaaaaacttggctatttattgattttaacaaagctacattatcccacataatacgtaaaactttcacaaagctacattatcccacataacaggcataccagctgcctatatctggaaacatggattgttacaaattagaagtaaataacttgataggcccaatttaacaaatgaagctcaagaagtgggagatatgagacctataatgaaagattaaattattttaaaaatcttaccacaaagaaaaatcagagtcaaatactttaactgttaaattatacaaaatatttcataaaaataccaatcctttacaaatacacaccatacatagataagagataaacaacccctaactactttatgaggccaatattactataccaaagccagacaaacccatcatgtgttaggattaatatgggtacatacggctgataaataaagacacataattctcaaaaagtactaataagttaaatacagaaacacgtaaaagtaattatacaccatggccaagtacaatctttttacaaatgaagtggcttaatatctaaaaaccaataatttaatacacaacattgataaagtgaagaacataaaatgatccttttaatagacacagaaaagcttgtgatacaaacaacactgattcattataaaatccttaacatactaggaaggaaaaacttactggaactactaaaaaggattcataaaaatttcccactaatattacacttgctgatgaaagactaggctctttgcctcacagttgtgggaaacagataagcatggctactttcgctactctactaaattgaactaaaggtgttaggcagagaaattatataataaaaacaaataaaacttctaaatttataaaataaacttttattgtaaatggcatcaacttatattcaagaatttttaaagagtttacaaaaatcaactggaactaataaatgagttcagcaggtcacaagatacaagataaatgcacaatattaaattgcacttttatacagtaactaagggcaatcagtaaataaaattagaaaaaataattctactcattagctcaatgtgtagtggcttaaaattccaaatatgcattatgtcttattttctgttggctacaaatactgacacagcttagttgaatgggtctaccacaatgtcctcatgtgtccggaattggtcggttcttggtctcactgacttcaagaatgaagccgcggaccctcacggtgagtgttacagttcttaaaggcagcgtgcctggagtttttcccttctaatgtcagcatgtgtttggagtttctttcttctggtgggttcgtggtctttctggctcaggagtgaagctgcagacctttgtggtgagtgttacagctcataaaggcagtgtggacgcaaagagtgagcagcagcaggatttattgcaaagagcgaaagaacaaagcttccacagtgtggatggggacccgagagggttgccactgctggctcgggcagctgcttttattctcttatctggccccacccacatcctgctgattggtccattttacagggagccaattggtctgttttacagagagctgattggtcccttttcacagggtgctgattgatgcatttacaatccttgagctagacacaaagttcaccacgtctctactagattagctagatacagagtgttgattggtgtatttacaaaccctgagctagacacggggtgctcatttgtgtgtttataaaccttgagctagatacaaagtgtcgattggtgtatttacaatcccttatctagacataaagtttctccaagtccccaccagactcaggagcccagctggcttcacccagtggatcccgcaccagggccgcaggtggagctgcctgcctgccagtcacacgctgtgctcccgaactcctcagcccttgggttgtcgatgggactgggtgccatggaacagggggtggagctcgttggggaggctcgggccgcacaggagcccttggcaggagtgggggagaggctcaggcaaggtgggctgcagttcccgagccctgccccgtggggaggcagctaaggcctggcgagaagtcgagcacagcagctgctggcccaggtgctaagcccctcactgcctggggctggcggggccagctggccgctccaagtgcggggccgccaagcccacgcccacccggaactcgcgctggcccggaagcaccgcgggcagccgcggttcctgcccgctccccgcaagataagggagccggctccggcattggcctgctgagaaaggggctcccacagtgcagcggtgagctgaagggctcctcaagcgcggccagagtgggcaccaaggctgaggaggcaccaagagtgagcgagggctgtgagggctgccagcatgctgtcacctctcactcatgagactgaagctgtgtctcaactgaagcttgactgggaaggatgcacttctgagctcaatctggttagttgtgcattattgttttgactcagttcttagtttctttctgtctttggtcagggcactctctctattctctgtcacacaagcctgtaaaaatgaaagcttaaaacactgaagctcgcttctccagagcaaagtatgcgacagacagagagaaagacaggaaaaaaggaagtaaacaatatcacaagagagagaaagtaagaagcaagtgacaatcttttcataatcaaatattggcagtgacattccctattttccaatgtattctactgccatgaagtgagtcactaaccacttactgtttacatttgggtgtgtatagttggaaataaaaattattatgagccatcatgaaggctgtgcactacgtatgccaaggtgagacaaatgggcctgattctaaatataacgagaaggtactacaatgtgtgttgttgttattgttgttgttctggccaaagaataacaacatctaaattttattcaatttcaatgttttcatggtggagtttgaaaaataaattcaagaggggacatgactttctcaagattcaagttataaaacccaggcatgtttgagagatattcaagcaatgtcccatcccttgtagtttctttctctaagtttatgcagtagctgtgtttaatatcaaacccaacagtcatgcgtatcattttatacatatctcatgagatcccttgcagctggatgccaccataatccccactgtgcaggctgtgagactatggagcccctgagaggcacaatgacatacttggcatcacataattaatacattaaacataaagactttaactcagcttgtatcctcaaacttgtggctctggctgcattccatttcctccggcactggtgcaggaggtgctgtatttgcataattgtgcacaagtaatcagatgacttgggagagaatggtgagcagtcagcagtgcagaaaagcctttgagtaggtcttattgaaggaagataggtcttattgaaagaagaataataccttcaagaagtgacctcatttctttggtgaaaggtcctaacagtactaagtattctggtaaccaaaaactcacattctaaagacagtccaccatgcagcactgttggccagaatctctcaagagagaaagatgttctgctgtataacaactttctgaggctctttcttgtgaggttctgttcctcacaagtagcaccttctagctatgtcttcacacgacagaaggggcatgaatattcctttcaacctccgtcacacgggcactattattttctcgttaacatgcagccctcctgacttaataactttctcaaagttccaataactaatagtatcacactgaatccacgtgtggattaagtttttaaatatgaatgtggagagtgaggaacacaaatatccagaccatagcaaaaagttaataagcaataacaattgcagtggacagtattattaatgcttgggatatgggaatttgatgtttctatcacaaaggttaaacaatggtttatccttggccgggcatgatggctcaagcctgtaatccaagcactttgggatgtcaaggcaggcggatcacaaggtcaggagatcgagaccatcctggctaatacggtgaaaccccgtctctactaaaagtccaaaaacattgctgggtgtggtggcgggcgcctgtagtccccgctactagggaagctgaggcaggaaaaaggtgtgaacccaggaggtggagctttcagtgagctgagatcacaccagtgcactacagcctcggagacacagcaagactccatcaaaaaaataaaattaaattaaaacatataacaaaattaaggtccaattaaaggtaaatatatatagcaaaaaaaaaattcaagctctgataaggttaattgtaacagattgtgccagaattttgagatttctggagatggacagagcccaagagtttccttctataacaatttctgtgaagtttcttacactcttattcaatttgaacgtggataaatgggttttctctgttttgttatttaagagattcatgataaggaaggcctatttatgcatgattcttaaacaattattgagtcagtggtgtctgctgaggaagggcacagaatctcatgcccacagaagcatgatgttctgtcagataggagacttctcccagagccagaacttcatctttcaaatggaattagagattttcacaggcatacattgctctgaagccctatcagaggcttagcactgagaatatgaccaaagaaggtgactaataaacatatgacctagtactctgatctacagtgattctaccctctcaaatagctcttccctggctctggaatcttttctggattcatctaccagaaacagatacactgaaagattgagaagaagcttttattctcactgtgagtcttgccctgtctcaccatcttctctagaagtgcaatgttctaactattcctgagagacttcatctcaggtagctctctctgacaacataattgagaagagaaacgagcaagactcagattattttgaaggcttgtctagggttcttacatgatttatgtctccaatttatgtcaatattgacaaatatagattcatctctagatggtagaaaaacagaaggaggagcctctgctcacagagaaaataaaagatgaattcaatgttttgtagagccagcttattttaaaccatggggcatttaatctttttagaaaaaaacaaaagcaatagggttttttgtttttgtttttgcttttgcttttgtgttttcgttttggtttttttttgtttgtttgttttttccctgaagcaactcaactgtggcctcagacaactgggcactgagaacgcatgctcctcactagaatttcattactacattgcagagaaatgggataattacaaaggatttttttttttttgagatggagtcttcctctgtcatccaagatggagtgcagtggcatcatctcagctcacagcaaccttggtctctcaggttgaagcaattctcctgcctcagcctcccaaatagctgggactacaggcatgtgccaccttgcctgggtaatttttatatttttagtacagactgggttccaccatgttggccagatggtctcgatttcctgacctcgttatccaccctccttggtcacctaaagtgctgggtgtgagctgctgtgcccagcccaaaggattcttaagggtgatatgggggatggaatggaaaaaataaacttagtctttgcacttccacctggtctaactaaccctactctcatcctatcccaaaattattgccagacttttctggagtgtgccaggggcaattcagaaggaaaagaggttattcatgcctatccatttcccatagctcctgagatctaagtcgttcactcccctggtttcaggttgttgctccccttctatatcctcagaattaatgtgatccattccaatacttataattgtacctttatctgatcccctcctattttgctgtagacattttatgtagtagatccagttgtaatagagacaagaatgtttatatacaccataatcagaactaaattggagttccataaccccttttttgactgggctgctactcagaaatcatacaaaccaggctgcctggaggttgcagttaggagaaatcacatcttgcccaggaatgtcagtgtggaaactcagatttggaaaatagattcctatagccccaatcattttgcaacacttctgcagagttaaaagaaagccagtatctaacagaaaatcttgagcttgcagaataacagaaaagaaaaaaaaaacaaaaacacaacttgccaaaacactgaaactccctctacttatgaaataaacaaactggcttaaattggtggaatcattatggccaaatggtgttttggcagaatcaccttgctgaggtcaccgtctgaattttcactgcctgtttcatcacaactccccttcagtttgcccatgacatccatgaggaggcaatgagcttgagagtaacgtttcagtataaaattgctttctcttaaaaacctgatgtcatagtattggcttctagcacttcaagaagtgagctccttttactcaataacaatgttatctatatcttagagacagtcaacaggagataatctcttctgggaccaaagaaggtgactaataaaccatttaatcaacacattacctaaccaaaagctgtggaccctgatgaggaaaataagttaaaatgagactattggctcattttaatagatatggtgataaaagcaaaaaaaaaaaaaaaaaaagagagaatttaagcggtctcaaatacctaaaagatgacatggattagcttcaagtaacacataatgtggctggagtcagctgatctttatgctgaaagtgtcaacagtagtgacaaatacttcaagtaacgggtcaaaagtctaagacagtcattctgccagaaatggtctgggacttccccatacatgggacacgtagatcaactttctccaagaaccaccaacctggcatgcagtgatgacctctgcagtagacagggatttaggcttgattgttgttcatctctttggagacataaccctaattgtgaacttctaaattaatggcctgacaattagatcagcagctaagataaatttcagtttgcagccccaaagaagatgttcttaattagacagttaatcattttcaatatggaagcctaaacacgtagaatgtggcaataacccggaactctcagttctgacaattgagtgaagtaatcaccccagattcaggttcctcattggctgacaatgagatcaaacacccacaccagcccagtgaacaccatgaggtgtcatcttccctggcccattagtgaaccaggaacagatatttagaaaatattcagtaaattggggagtcccacagagtcagaaagtttgcttgagatagtagagggtggcataaaatttctaccgaatatgaattttaatttttactttagtgccgtttctattttagtctaatttccttctagaatatgttatttctatttaccaagtggcctcctgtggtctttttcatagagttcaaatcgacccatctaaaaacagaaagatcaagctaacgacctccctcaggggtcagaattcagtttcacagctctgtagcaagctcattgttgacttacaaattagtgtaaccaatagtaacgtcatggtgaccataactccaacatcccaaaaagtacctcaagttagaggctgacttcatttatcagaggattcaaatggcaaaatcaagctttactagatcactggattactggaagaagtgagcaatgcgaatctgcaatatagtttcactaaactttaataggacagcaagactgtagatattttagccctctcaaaatatgaatcttctgatcctttcatctagaatctctatgtgtgccataaagtcctaactctgcttgtgcctatactttctgttcatgcagagattaaaagacaaacaggtgggagcttagtgttttagcgtttttcctgagaatctgtctagcctagagcatccccatttttttctagattccaaggagtactatcactatcctaattctcagtgtcttgtttccaagtatttcctcctacgattgtcagcgtgactacctttttaccccactgatagtgtttgctccaggtgaactgggtagttcatttttatttaaatgcttccataagcgttaagctattaatttaagatttctttgttttttataaagtaattctgctgtttccctcagagctcaactttcactaagtctcataaattttattatgttttgtctaaatgtctatttatgttaaaatattctctgacactatttgtacattttttattcattaattatttaagattgtgtcatttaatgcacacatgtttgcatttcccaaatttcttgcttttttggtctctaattttctcttttgtgattagaaaacattcattttattatttcaatctttcaattttattgattttttttatgatgcagcatattctccattctagagaatgttctatgtgcatttgggaagaatatacattctgatttggggtgaagagttctccatatatctctagttttatttggtttatgttattcatgtcttctatttccttgtttctcttatgtctagttcttctacccaatagtgtaagtggggaagtgaagcttgcaatttttattgttgaaactattgttgcaactatttctgcctttatttctatcagttttgctttatgtacttctgtgaacttttgttacattcatatatgttaatttattttcctcatgaatttatccttctaattataatctatcttcatctctagtaatagtatttgttgtcttaaagtatatcctaatttttttatttttggtttttctgggtgcatagtaggtgtatacctttatgaagtatatagaatattttgataccgtcatacaatgtgtaataattacatcagagtcaatggggtattcatcacatgaagtattactattggatttcaaataaccaaattatacaatttctgttattttaaaatgtacacttaaattattcttaactagagtcaccttgtgctgtcaaatgctagaactgattcattctttctaactatatttttatacccattaaccattcccacctccccgccctcaaccttctactacttctctcagcctctggagaccatcattctactctttatctccattaattctttggttttaatttttagctttaacaaataagtgagaacgtgtgaagtttgtctttctatacctggcttatttcacttaataaaatgaccttcagtttaacccatgtttttacaaatgacagaatctcattcatttttatgtctgaatagtactacattgtgtatatgtaccacttttttgtttattcatctgtcgataaacacctatgttacttccaaatcttggctattgtgaatagtgttgcagtaaacacaggagtacagctatcacttcaatacacagatttttctctcttttggatatatacctaacagtgaaattgctggattgtacagaagctctatttttagttttctgatgaaccttcaagctgttctccatagtggttccaccaacttacattcccaccaacagcatatgagggttcccttttctccgcatgcttgtcagcatttgttattgccttttagctaaaacccactttaactggggtgaggtaatagctcattgtaattttgatttgcatttctctgatgattcatgatgttgatcatcttttcatatacctatttgccatttgcgtgtctttattggagtaatgtctgtttacatattttgcctattttttaaaataggattattagattttattttctatagagttatttgagcgccttctatgttttggttacaaatccattttcagataggtagtttgaaaatattttctttcattctgtgggttgttttctgactttgttgattcttttctgtgccatgcaaaattttataacttggtgtgataccaattttccattttgctttggttgcctgtgcttgtgaggtgttactcaagaaatctttgcttaatccaaggttttttagaatttccccaatgttttctttcagaagtttcatagtttgcagttttacatttaaatatttaatccattttgatttagtttttgcacatggcaaaagatagaggtctagttttattcctctgcatatggatatccagatttaccatcactgtttattgaagagactgagtttttattcttaatatattttcttggtgcctatgtaaaaaatgagttcactgtagatggatggtttggttctgggttctctattctgctccattttcctgtgtgtctgtttttatgccagtactatgctgttttggttactacacatcggtagtataattttgtgtaatgtaataatgtatgctatgtaatgggattcctccagttttattctttttgctcaggatagctttagctattctaggtcttttgtgattatatataaatttaagattttttagagctgttgtatttatttgtgtgaggaatgtcaatggtatttttacagaaattgcgttgaatctgtagcttgctttgtgtagcatggacattttaatattgattcttccaatccataaacacagaacactgactaatacaatctgcaaatgggtagtttgacttcctctcctcttatttgaatgcctttatttttttctcttgtctgattgctctggccaggattttcaatactatgttgaacagggctggtaagagagggcatctttgtcttgtgccagtttccaagaaaaatgcttccagtttcacccattcagtataaagttggctgtgggtttgtcatagatgacttttattatttcaaagcatgtttcctcaatacctagtatatggagagttttaacataaagtggttttgaattttaatgaaagctctttctgcatctattacaataatcatgaggtttttgtctttcgttctgtttgtattatgaatcacatttattgatttgcatatgttgaaccaaccttgcatcccagggaaaaagcctacttgattgtggtggataggctttttggtgtgctgctggatttggtttgccagtattttatggagaatttttgcatcaatattcatcaaagatatgaaatttttctttcttttgcttttcttccaggttttgatatcagaagggtgctggcctcataggatgagtgaggaagatgatcctcctcaaatttttgggagtttcagtaggaatgataccaaattcttctttgcatatccagtagaatttggctgggaattcgtcttttcctgggctttttaaaattgatagtctatttattacagattcaattttggagcatgttattggtctgttcagggattcaatttcttcctggttcagtcttggaaaggtgtacatgtccaggaatttatctatttgttctaggtgttgtagtttttttgcataaaggtgttcatcatattctccgatgtttatttctatttctgaggagccagtggtaatatcccctttgttgtttctgattgtctttgtttggatcttctctcttttcctctatattagtctagctagtagtccacatttaaaacaaaacctactcctggattcattaatcttttagtttctttgtgtgtgtcctaatctcagtttatctctgattttggttatttctgtcttcttccagctttggggttggatagctcttcattctctagatgttttagttgtgatattgagtggttaaattgagatctttgttactttttgtggtgggtgttcagcaacatcagtttttttctcaacactgatttagttgcatctcagggattctggtaggttgtgtctttgttctcattactttcaaataactttttgattgatgccttaatttcattattcacacaaaagtcattcaggagtgagttatttaatttttatgtaatcatatggtattgagtattggttttctcaacttttacctccaattttactgtactctggtctcggagagtggttgtcataatttgaattcttttataatttctgagaacagttttatgtcgattaagtggttgattttagagtatgtgccatgtggcaatgagaacgtatatgttgttgtttttggtggagagttctgaaagtgtctgttacatccatttgatccagtgctgcattcagatcttgaatatcttgttaattttctgccttaataatctaatattgtcaatgggttgttgaagtttttcactataattgtgtaggaatctaagtctttttaaagacctctaagaacttgctttatgaatttgggtgttcctgtgttgggtgtgtatatatttaaaatgtatatatttaaatatgaatacatatattcttgttgaatttaaccctttagcattttgtaatgcctttttgcctttttaaatctttgttgttttaaagtctgtttgtctaaacttagggttgcaacccattctttctgctgttttccatttgcttggtagatttttatcccgtcattttcagcctatgaaactgattgcatgtgaaatgagtcttgatgacagcatatcattggttctttgttctttatccagtttcccactgtttgccttttaattggaacattcagcccatttacattcatagttagtgttgatatgtgtgcatttgatgctgccattataatggtagctgcttattatgcagacttgtttgtgcgcaactggtctgtatacctcagtgtgtttttttagtggctaataaaggtttttttcacctatatttagttcttccttcaggagctcttgtaaggcatgtcttgtagtaatgaatttcctcagcatttgcctgtttaaaaagaactttatttctcctttacttatgaagcttagtttggccaaatacgagattgttgattggaatttattttcttcaaggaggttaaatattggtattggtctcttctggcttgtaggatttctgctaaaaggcgtacttttacactgataatctttcctttgtggttgacctccctttcctctctagctgcatttgacattttttcttttatttcatgcttgaacaatctgataactatgtgttttggtgattattatattatgaagtatcttactggagttttctgcatttcctaaatttgaatgctggcctctctagccagcattccccaggttggggaagttctcatgaatgatatcctaaaatatgtttttcaaatggcttccattctccccacctgtttcatgaacaccagtgggtcatacctttggtctctttacataatcttatatttttcagaggcttgggggtttttattactcttttttatttctgtctgtatgtcttacttcacataaacagtcttcaaactctgagattcttccttagctttgtctattctactattaatagttgtgaatttcttataaaaaaatttagtgtgatttttttagctctctcaggttagttatgctcttaatactggctcttttgtctctcagctcctgtatcatttcattatgattcttaacgtttttgaattgagtttcaagttacttctgcattttaatgatctttatttctattcatattctgaatttgatttctgtaattttagctatcttggactgatttataaccttactggagaggtactgtgaccatttgaaggaaaagaggaactcaggttttttgagttgtcagaggttttgtgcttgttctttcttatctttctggggtgatatttctttaatatttgaagttgtcaacttttggatttttccttttattctgcttgatgaccttaagggtttaattgtgttataaggttggctcagtcaagtggttttgtgtgtattcatgcaggcgaaggtggctgctcagggctgaggagagtatgctgttttttgtgcttagttgtactcaaatgacagtgttgacaaaggagcagggtgctggtgttgtggggcagatggcctctgtttcccccaagattctgtctgcagtggtggtatagcaggagagggggcctggagtacactcctaccaacagcagtgccagggcagaatgcatatgcacatgtgcactgacaggacagggaaagcaagatccttccatgcacacacacacacacacacacacacaccagcatagtgatgtgtggggtggcaatgggccttggggggaagctgcagtgaggagaggcagcaggcaggctgatgcctggatggggtcaccccactggagctgtctactagtcagacatgatctgccagttcaggatctatgatgcaggcccccagggtactcaaggctgcactgcaagcatgcagggccgaattggggtcgcaggagaggccagcacaccaacgcaagctcaggtcaaaacagccccatctgatgggccaccaccctgcagactttttgtccaaaatttcccctagggctaacgtctcttatgggagcaagttaagcttattggtgtgggcatccctggacatgcttcactacacatgttcccacaataaaccctcttggctgtgcactggctggtgtgctgcccctgtcacttctctaagcagctcttcctttcaactcattttccatgatggtcagagggtctctgccagtgggattccagaggccagtcaggaaagcaggtagctccttgccacttaaactcacctgtttttctcagagtcactgggggccagaaatcagttccactgtgctttagccctgtgcagggttcccagcttctgaatcttaagttcagatgttgtgtctttcctccatcactatcagtacctgccctcggttaagagtgtgccagtcatcctggtcccttggtgtcagctgttccaccttggtttgtctattcagccatcttgctcaaatacacaaagtcttataaatcaataataaatagacaattgactacttgaaaaatgtgcaaggaatttgaattaaaaatttctacagataagaagcaaaatttgtcattaaatttaaaatatgtgacattattagtttagagaaatgcaaatcaaaagctcaatgacatacttactagaagacctgtaaaaggcaataaaaaaggttgccaaagatatcaaaaatatgaaagcctcacacattgtatgtgggagtgtaaaaaacaaccgatttaaagaacaatttggcaattattcaaaatgctataaatagtatcaccatatgactgagacattttactctgttacgtactcaaaagaaatgaaaacctatgactacacaaagaatcagatgtaaatgatcaaaggagcagtatttgtaatagcccaaaggggataaaaccaaaatatccatcaaataataacagaaaaaataacgtgtggtgtgtccatacaataaaatactatgtgccaaacaaagaaaatgaagtaataatacctgctatgtcaggaaaaaacctcaaaatcactaaagtaagtaaaataaaccaaatgcaaaagggcagataatttatgatttcacttaaaataacttttaataaaaggcttatatataaaaacaggctaatgattgcctatgaccagggtaatgaaatcagtaagtacaaaagagattaatttctttttccatagtgataaggtgatttcaaaattagattgtggttatgggtgtctgtaaatacactttaagaacttggaattgtacacttaaaacatgtgatggttttgttataagattatatccctctaaaatgtttccaaatgaaactgttgacttttggagaactaagtcacagactgtaaaaccaaacccatttattgttcatctcaaggcatgttaaataaagaggaaaagacaaagatatagttataacattaaaatcttcatggcaaatagttataagaaaaaaattacaattgtaaaatgtattaatagacataaattacctgcttagatttaccaggccagaaatgtaaattaaataatagtacactattgaagaccactctgagtcactgattattagaaacttgttatgatgtcatcataaggttaaaatattccttatcaaaaatgactcacagcaaaaatgttaaataaagtgtgttagtggcacccctgtccacagttgctggtacttttagtgtatggccaattagaaagctgctcttttgtccctcatttgtaaccaatttcaacactcaaattcaatattgaactcctaaatttattgataaaacatgtgagaagatgtttaaattatatatttaaaagatattatgaaaataaaaaatcttagcaaacatagggagaattataaactaacatttatcatacatacccaccacaaggcttcagcaattctcacattttttatctttcatttttaattatcaacttcaattattctggtaatattttcaagtaagcatattatgttgtcagtttgtagaaatttgagtacctatatctaagaaataaaaagaaaaataaaaatagtactataaaatctaagtaaatacaagtattttctaatattgtactaaagagtttcttgattctttacgtgcaaaacagtagaacttagcaacctccaagactttatgagaaataacaatttaagactaatatttatcctggagactcaaagtgactataaataaatatatctttagttaataaagcttaaaaataaagtattaataaaaacacattttgaagatggctgacacctttgttactagacatggggcttgtgctgtaaataactagtttaaaagtccatggaaaagggattttcaaccaaaaagtctatagaaaacaaaaaattttggtttttctgaactcaggatgtgaggccagcttttaaagcactgaatttaaaaagccctcaagaccctaagcttgataagcacgtcaccagcaggtctcatttttcagctctgtgcaccaggtggcatgtctagcaaaatgtcccctctcatgtcaggttttttctatgaactcagaatgaccactgtcccttagtatgcagccctgcagtggacccaaaaatgacaatcaatcaggtccagagttgctcattatggcctttccagaatgtaattatctaaggacaattctcccccttgtaaaattaagaaagtatcagaatatttgcctaatttttgataacatcatactgtgagccacaaaaaagcaagaatttaaaatgtaagggattatctggatcctagggcacagaaatacacctcaaatagaatagtttcacacacgattttatatgtggacttcctgtgtggaagaaaagaatgtgggggtcaatagtagagaagtctgtatgtagtggaattttaagaaatcagagaggccgatggggttcaggagggtatttattaattatttaggtgcactggtccagtggattaacatccaaagaatgagtcctgaacaaagagttaagttaccttttaagcatttcatgggtggggagagatttgtgcagggagaatcatactacagaagcaagaaacaaagacagttattcaattgagacatgcattacattatttcttacttttcaaggaaaaacctgttttgtgacttgaatttatctgtctagtgaccttgcagcttcacagcttgggaaacagggtcttcacaatccctgggaaaggaggagagataaggatcactagccacagaaaaacaggcagttagtttttaaaggactccagctcttactctttctcaacagaagttgggttttcttacacacaagtgagtttctgcttacacactctttaatctcttataattcctgttccattctccccattggtgctttttataacagaggtgttaatagaaagcaccattatttgccaagtcttcatggagctgagctttttcttcttctggcggtggctgatatctggttaatgcatcaactgtacagactgtacagtagtgttttgggctaccattgcctccatagttgactgaatactcctaataaacagagacaaaaggcaagggaggataaggcagatgcaaagaataagcaagaacctactaatgagggtttagaatttttcaaatgctgagaaccatcctccaaacaaggaatccggggactacctggatcaagtctgaagtggaacctgggccaacttgtgcattctagctgtaatttttatgaccactaatattgatttcttggctattgatttctaggcaacagttggttaaattaaattttctacatattcctccttcggaggataagagataatttaaagccagcctattttgatatatagcatttcctttttgtgttgcttgtattgccaataaatctagtgccctcgatatttcattggttatgatttgaaggactgcctgcaacttcatgatgcggctgaggatatagattatggtgcagtaccctcatgacctgtcttgcacctaggtagctggcccatagcatgtcatgattctttcaggaggtcatttattatctttttagtctcctgtgtccacatcttttttgatatttttgttacttttgtgattatgctttttctagttcttcttttatttttattataaactggatattctaagaatttcccttgctttagaggaattagaaagaaggatggcttgattgcttttaacagacatgtccctgcccattttgctggcagttgccaatatgcccatgctccacagatccaatataggccagagggtgcctttcaagcatttgaatcatctacctgatgccaagtgcagcttagagtaaggaatccagagaaagtgtttggatctggtaagtaggagtcattctgggcatttcttcatagagttttgtttttagtctcgtaataatactgttgccctaggaaggttgtttttcctactgcgtctgtgaaagcctttccccatcgagtgatacagtactttccagttatggagatttttaacaatcaaacactggctgaggctgttggttcactggcagggttaagcaaagtgaagttatcttgtggcattaattcctttgcctcccattgccactcattctccatattagtttctctacatacatagcatgaagaaatttttaagctgccatctgtgttttcagctagttgagcaaataagtttttggttgatgggggaacctcgggcactggctgatcaaaatgcttacagaatgacttggtattgaggggttggatgcatttgagtccttatagtatttttgacaattagtagtggaactccaagacctgctccttgtctatcaactggtaatagtgctgtctgtcctgtagaccaaaaaggtagctctggctttaagatagtaaaatttaaaggatcgcatgtccttgtcttacaatctggtttttaggattatgaacatacgtggcatggcagtcatcaaagaagaaataggccctttttagaagggtgggatttctttggtttgagctataagctttccttctgtttctccctctgatataatatttacctcaaaatagaattaatagggtaagagcccaggctcataacatacatatagctgattatttcctcagtcacagactgaataggtggtctggttgtatatgcatattcctaatttgcttcctgtacattcatagtaggtatggtacagtagagttttaactgtggtattttttatccaggtaatgtgtacacagcatggacatccttcaagagatttatcccctttcagtataagcataaatggtaacaacattgttgtatgtaatagaaacatgcttacactacacatgggcacaaaaactttcctctgggcatagacatttgcagcatttgcagtaataacataacaacggaacaatcagtattgacagaattgtaactatggttataaattgtattcacatttacttatctggacatggtcctcttagcttcggctgtgtgtacactagtcagcttccgggatgtgactagagcagagtttgaagaatccttaagcttcagccatgcttagactgaccagcctccagtgtggtcagagcagggcggttgtcctttttaccggtggctgagatttgccatagggctattcgagtggggcaatctgggtcttgttggctaatccacaggttgtcatcacgactcgctactgtcactggttttagatggctatggtgaatccaaggtgtggcacctgcaactttaacagcagtgggagtagacatgattacaatatggcgcctatcgtatatgggtcctagagtggttgaattccattttttacctaaacgaagtccctaggtttgaaagggtgtactgggtctgttagacttataggcatttttttacatacttaaccatgcattttagtatagccatacttaaagcctgcatttgccttcttaaagttagttttcccaatttacagagattaccctgaatctgatttttctggggggtgggcagctgaacaaaatctcagagggcgaatactcagttttttggtgggggtgcacctgactcataagaggaccatgggcaagacctgatattacttcagatgagtttttcgacaaaatttcttcaacagctgcttgagtgtccagtttatgctctccactttacctgagatctgctacctgtaggctgtatgttatttccattttatttttaatagtcgagttaagtcctgaactattttagccacaaatgttggtccattctctgatcttagagttagaggcagcccaaatctgggaacaatgtctcttaacgccttggtcacgtctagtgccctctctgtcctggtgggaaaggccttgagctatcctgaaaaggtgcaaatgaacaccaatatgtactgatagcccccgtctcagggtcattcagtgaagtccattagcagtttttcacagggcatggctcctttttcctgaactcccatgggccgagtaggatcttgtcgtggattgttccgagtgtaagttaaacacagtttacaaatggcccgagtaatagcaatgagccatggcagataaaaatgatgccttaataatgtctttattttttttttaatctgagttcggtggtggaattgttttacaaatctgggggtcaccatttcaggtatggctagcctcccattgaagaatttgtattatcctctttcaatgtagttcttattttcctggggaagccaagctctgttatttggagtgaagattgggatctccaggaggggaatctccgggaggagaggcatagctaaggcatcttctttaggtggagttgtcattgcagccttctttgcctctttgccttcgtatcttttttagcccttagtgttcttgctttttgctgcctcttgcaggacttcactaccgtcacttttggggcccatacagcgtttaagagctgtaggatttcttccttgtactttatttctttgtttccgcagttaaaagtcttctttttttctttgtaaataaccttatgaacatgcaaagtggcagaagcatatttggaacctgtataaatattggtcttttggtcttttgctagccagagaactcttgtcagagctcttagttctgctttctaatcagaagtttctgtagatgaagactgcacctctactgttgagtctaaagtcaccactgcatacacagcttggcgggctccttttagtatgaaactgcttccatcagtagaatattcaatgtttgggtccctgagggactgatctgtcaaatctctctggcttgagaacacttcatctaccacgtccacaccacaatgaaacggtcctcctggcactgactcgatgagagtaaggtagccggatttagggtattcacagtctctaaagttagtttactagcttcctgcaccagtacggcagtggctgctagtgctttaagacaaggaggccatccaagtgcaacagaatctaattgcctggataaatatgccaccaggcgatgccatgaccttatggcttgagtcagaacccctatggcctccctttcacttgtggacatacaagaagaaaagcttgattagttagatctggcagtcctaaagctggggcctgagtcaaggcttctttgatttctttaaaatccttctcctctttggcctcctagaggaggggctccttttttcctcctcttagtggcttggtatgatggcttgaccatgagcaagaaatttgggttgtaaacgcggcagaaccttgctgctcttagaaactctcttacttgacaccgggtggttggagtagaaagtgcacaaacagcctgctttttttcaggactaagccatctttcctcttggcttatataaaagcttaaatattgacacttttagaggagatttgagcttttttctgacactttttattctgccttctacagcaggtgcagtggttcttgggtttcttctgcgtgtagtagcccttggctggtgtgtgtgtgtgattttttggttctgtttttttgggtttttttggtttgttttttgtttcttttactattgccctgatcattttcattatttctttgacatttatgcttccagtgtctttccttttgcaccatgcacattaatctctctctagcctcggctggccttcacactcctgtccagactagcctttttcatgactacgttcacgcccgcgtccatgcctccttgtaaagccagctcctcttcccggaagggctgctgctagtaagttagcctttcttaagcctgtgatcagccttttcctttgcctcctcatctcggttaattaacaccttggttgtcactttaataagctgagtagcattctcgcctacggagcttgtaacttctgcaatttatgcctgatatctccttgggtctgccttacaagtgctggattcaccctgcactgatttttgagtagcctcagggttaaacggagtgtacaataaaaatgcctcacaaagtctttcatagaacttgctgtgcttttatctgcaccctgaagcatgtctgagatttttaaaaatattgattgcctttttcttttaccatcctttagcctttgcagatgggcttctcggcacctttgtaggtgctgaatctggactgcatcatctgggtcctagtgggggtcctcctgtcctcttaagaggcatgagcatatcttatgcacgaccagacctgagacggcctgcctgattttcgctctcatttcaccttctcgggtgagactggcagcatgtatccatttgaacttaactccttagggacagttaccttggtaaagggggtagattggaatgtaaggaggagcggtctctattcttttctgtggttgttacaaaaccggtttttctgccttttctgagattttttcatttgtcttcagctgctggggcagctgattttactttcacttttggctgggaggtgctacaagcctctgtgtctccttttaactctgtagctgccagagcagctgattttctcttgccgtgagctgcgagcattctacagtaaactgctaggcagggctgcattcatttagccatgagtcaatataaagactaggtctgaatgtcctggctgttctctgaccctagtcaccaccttaaaacacacggccaatttttctatagtgcctttggcaagccatctgacactaaaacagggctattctaattcacagtatgtccttaacttttgaacactcagtttcatcctataatcacttctaactctttttttaaaattctttattatgcttttcaaaggagccacttttgatgttttcactctcatttcctctcttgcagttcactttcactctgactttcactcttgagtccaccagacctggtcctattgcgggagtttcagatgctgcttagccaggaccatgccttcccctgtcgcagactgctgcagctgtaaagctggtactatcagccatatgaagcatcttaggtctgattttccccacattcgcctcagagcacacagccaccactaagggatctgtgcctccccatgtcgctgcccacattggcctctcccaatgtaacaggaagagctgcagacaaaaccccttggacactgagttaaagaaagaaggtgtttattcacctgggagcttcagcaagacttctttcccaagagctgaaccgtccgagtgagcaattcctgtcccttttaagggctcacaactctaagggggtccgcatgagagggtcacgatctattgagcaagcagtgggtatgtgactgggggatgcatacactggtaattagaaaggtactgaacaggacagggatcttcacagtgcattttttatgcaaataaccgattaggtcaggggttgacctttaactaccaggcccagggtgtggcgctgggctgtctgcttgtggatttcatttctgccttctagtttttacttcttctttctttggaggcagaaattgggtataagacaatatgagggttggtctcctcccttattttccccctttgagactctcactcattttattagtgggagttctcaccttcttcctcactacctatgtcttcctctatcacagattgatagtgattcatgtagtacactcgtgctgaagcgttctggtgaactagagttgccatgaaaacttttaccacttgaatgagtacagctagtaagcaagagatcagtaagcaggttcctattactactatagtttccattataagagttttaaatccttctagtgccgggaaccattttcaaacatggcctcagtgtcaaatcggtgccacacctgtactggcacatgtgccagtttcatcatgtctttaactatatcttcgactacttgcccctgatcatctatgtgcagacagcaagtgggcctaattacagtcattaaattgggcctaattacagtcacaatcaatttactaaaataaccagacagcaagacaggtttccaaacattggcaaatgtttcagggagaaaaaaatgccccactagagaagcatggttgtatctctgtgtgtacatacacacggggccaggcagttctatgcatgatagtctgggactgtaaaagtgactatgcaaacctttacattctgtcacagaacttacaatttaaagtgagcatctttttctgtgacttagaaattgactttttttttttagttgggagccacttttagcaattttccctttgttgatacataataatagtatatatttgtggtgcatgagtgatattttgatacatgcatgcaatgtacagtgatcaaatcagggtaattagaatatccatcacctcaaacatggatattattttctttgtgtttgaaaaatttcctttgtgttgggagaatttaaagccatctcttctatctattttaaaatatactaaaaattagtgctaactgtagttatcctactgtgctgtcagacactagaaattattcctcctatgataaaaagtttaggctgtatcccatgggtagtaggacaccacatgactgagtggtcatctgggaaattatctggatgactttggaacattcctggttgagccaggtggctgttgcaacaaactgtggggaagcccctcccctaatgccccctaagccagctgtcactacatggcaggaaacctccaaacctgagggccccaggaaacaatgacagtccccactcacatgcaacttgtgctgtgctcagtgccctccacattgagcctgatctagctttacccgagggctgtgaggtgggacaatcagtatccctttattttaaaaggctcagtgaagttttgggcttaatgtgagtgaagtgatcctaaaagctgactctgggatcccggctccaccactgaccagtcctgcaggtggcgagagttgcctctcctcccctcgatttcattttgtcctctgtgaagtgcagccgtgctgatgactcacatatcagggatacatgggaactgtcaatgaacggagtgctctacacagtgcctggagctcagaatgcagatgagggaggagggtgagccataattctgagggaagtcccaacataatttagcccttccatctagtagccgggccccagtacagagtcctatgtcagtgacagggcaaactgagaccagctcaaacacagcctcttcctcagcagcagggcccaactaaggcacttggtgttttggttcatttcctgcagcttcaatgtaaagaatattgtgagacatttgctggaacaactgaaaatcagaagaagaagagacagctcttctccatctccctgagagctcttccccagaatgtgtttatccagagaggaggggaaatatttatttttcgtaaatagtaaatgctagagtcgaatattatatgaaaatctcattctactacaaaatcggagttgtggttgtggttctttttatttcacttgtgtaagcttaaatgagatacagactctaacatttctccttgaattatgaaatcctaaagagtcggcagcataatgtatgaggaagaagagaaaagcagtcatagtttctggctgccggataagacacccaggtccatttttctcagagcatatgttcattttaatattaacccaaggaaagagtgaagatagatcattcgaacttgcagaattaataatttgaaggtattttcacaaagcatagcgacagtcttggaaatatagatttctttaaaaagcagttgcagagatcaggaggatgaatacctttctatgattttacaaaaaataaatcaacttctgcttcacttgctgaggtttcctctaagcaactattaggacattgttgttttttcttccaactctggagttgcatcaggtctatgtggaaaaaaacattataaaataaaatgaccaaagtcaaaaggagaaggccagggaaagtctattgacaatggatgcagggcagaaaggaagctgcattctcaatcttcttctggtgtcctgtgattgagcctttaccttagatgtaaatcctcccagagttttgtctcttaccttagaatttctattctttttttaagttagtttcttatctagaatgaaagaattgtaatgccactttatggctacacctgggccttattctgtaaatatttttactacctatgaggtaaaattcccagcattagggcaattctttatccaattttttctttctgagacagagtcttgctgtgtcacccaggctggagtacattggtaaaatcttggctcactgcgatctccacctcctgggttcaagagattctgctgcctcaggcttctgtgtagctgagattacaggcacccagcttcatgtccagctaatttttgtacgtttagtatgtttagcaaattttgtatttttagtttcactatgtttgtcaggctggtcttgaactcctgacctccaataatctgcccgccttggccttccaaagtgctggaattacaggtgtgaaccaattctttttgaggaataaattacctaaaggtcctcaagcctttctgtcaggcatatcttggccttttctctctgactggggtccgatgaatcacaggtgggcactatttttctatattcccaaccagtgataatccttgcgctctttatttctaattaaaagaaatccaaaatggagatagttatttgagaggtctctaaagacaactaggaggacatgaggagttgaattaatactcatacacacccaggtggaattttacctgttcgaactgggaaaattacagatgtcctaaaaaggcaactgcatttgacttggattgtttatactgagcctgatcacaaacctcctggagagaaagctgtgctgaattaagctgatgattgcctagatacagtctaagctggcaatcaaacattgtccatcatagactgtgctaaaatctttcacttgtgtaaacttgcagtaaaactttataagtccctccctaacctcatctgaatggaacatgatatagcttcttgctaaatttgtgtctcccaaatagcaatttataaaaaatcatgattaaaatgccttttattttattttccacagggtctgttttactcccatgttataaaatgcttttctcaagaaagcatagagcccattctcttctctagagagaatcgcagccttgcaaaagagacaactaaaaatacatacatataagtatcaagaatttaaaactcaaaatattaaatatgttacaaaagtatataagcaatagaataaataggatgaatagcaaaatggataaaatcaactgtgagttgaaagcctgaaagttcaggtgaaggtgttgaaaatgcttcagaaaaaactaaagagataaatatttataaaaataaagagctgggctcagtggctcacacttgaaatttcagctgctagggatgctgaggccagaggatcaattaaggccagaagtttgagacaagcctaagcaagaccttgtcactgaaaatgttttaaaaattattttgacattatagcatgtaactgtggtctcaactacttagaaggctgaggcaggaggattacttgaactcaggaagttgaggttacagtgaactataatcatgctaccgtactccagcctggagtgaggcaaaatctagtcacattaaaataaaataaaacaaaataaaataaaataaaataaaataaaataaaataaaatataatctagtcacgttaaaataaagtacaattatcaaggacaaaaataaaattgtacaacttggcaatagaaaaaaaatagagcatagagcaactgggggaaagggggttgaaagtataatttcctttttatttccttagttggtcattacttagactttttcacttaattaaaattttcttatactttggtgcccagttaaccccagagcatttttaattaattggtttagaggtagatactcatataagctttccactgcaaattacaagagccaaattttaaataaatgttggacctctaaattttctatttgcaatatttaaggaaataaaaattataaaaaacactttgtaaaacatttagtatgtaactgctgtttctaatgtataataaatccaattatggcagagactcactctgttgttgagaatctctccattatatgactgctgcttgtggtgcttaaacctcaggaagaaagaatatatgaatgtctgaacattgctttaaaaagacaatgtacatttaatgtagagatatgtgaccagcttagaaagctgcactttttccacagcaggcaaaccagagcctggataccccagggtcacagctcatgagaacatagggctggactgtgagaaaacaagaagcaattcgtgcagaggagttgacaagacaccaactgggctgagaaaaaagagctgatagattaatttccaaattatactacaaaacatacaataagcagaccccatagctttatacattaaaaccaaatgatgacaaagagtgaggattgcattaaattaaattaggagcaactaaagactggtttatgatcttgaaactttagtcactctccatagttccatcccatgacccggtaattatttcctgctttctgcatgccttggacactggtccatttctggccccaaagtgttcctttttctaataagagtacttacttcatctcttaatacaattcctttccttgcatactgtgccccaaagaagaaatattaaaaactttcctgatgtttttctgctgcggggttaatgggctcagagtgatgataagaacggccaatgagtgtgtggagccagatagtgcttaaaatatggacttcagtccagtgaagtctaacaagattggcacctgagcactcttctctgagacctgaggatggactcactgaacctggagctactaacgcagctgatacccacatatatacaccacctgtgttcctagaaactggccttcccagcccatcacagcaaacaccaacaccagcatggaacgcttgggagtcagaggtttttcttgtcgttgctactgccatcatccatgccataaccactgtccaggggctcaagaagctgcccacccaccttgctcactgctgacacctgagcaaatcacatgaaggccaaataattagtcttcctggacctgttaacactgctgccagcataactgccttgagacccaaaagcaggcatggtaagctcaccactgccaccactgggatccaatgactaaacctctggtgcccctattcccagcaaaactttaccacagcctctgctaaaaacgataccctaagccactgagaaaggtacagacaccactgatactctttacagccaaagaaatcatataaagacaggccgggtattgtggctcatgcctgtaattccagcactttgggaggccaaggccagtggctcgcttgaggctaagagtatgataccaacctggggaacatgtcaaaaccctgactctactaaaaacacacaaatttgctgggcatagtggtaggcacctgtaatcccagctacttgggagactgaggcacgagaatcgcctgaactcagaggtggagcctacagtgagccgagatagtgccactacactccatcctgggcaacagagcaaggttctatcttaaaatatatacacatacagagtttaaagtctgtgctctcctctcctcagctgccttgtgactgtgtaagtgtatgtttgggaagggagggataggatgaggacaggccagcagagagtcaccagcactggctaaaggtctcagaccaaattttatactcttgaccaggagaaacttctctgttattctaatcacattaaactcaagcattttctttttttctttcttttttttgagaaatcacatcgaacttccaaaattataaagttgaaaatatgtaataattgacaattggaaacaagaaagaggattagctataaaaataactcaggacaatgtatttatcatgaaaagatggtcttggtggaagaaagtttcatgcccagccagcccattcttcaatatctgctaaaaaaaaaaagagcaaagggaacttaaagacatcatagacttggaaatttcgtctcacagtgcattaaattcccaaatcacatgtggaagagaagaagctgctgcatattagactaactagttttactgaatgttgtctgttgatttaaaaattaatactcttatcaagagcaaattgaaatactgaaagttatttactaaacagcaaagaatattttcagtatataaaaagatttaaaaaaacgttgacaccttaactaaatctgacacaaatttaaaaggaaaagtaactagaaaatgaaagaagcgttgtacaagtatgcgatgcaccctctgttgcaccaactgctcctgtttgttgagtcccctcttctattctgcctcctccatctccttgctgattcccctttttgtctattttaatttctctctctattcctttctcaggtcaccatgtcacattccttttgtgtcttttgatgtccaatctcaccgacaccaccttcattctctattttatctttacaaatggttaattaggcataaagagggaaaacactcctgggaagatacctgaatcctggtgcacactatcattatcactgtttttcatgttgatgctcatgtgtctctgctttctcgacagactatttaatcagcagacagatcaacaggccaaaatttccaccatagttgcaaatttgaatgcggatgaatggattaaaacacattcaagtcttgcaatgaacggcataatgtatggtggtataattcagagtggttacaggggagagttaaagatcattgtatacaatatcactcgagaatcttttgctgtaaaactgcagatgtgggttcctcaatttttagtggtaccttgtcaacaattaacccctgaggatgtctctgccccaacagaggctacatacagaactgggagattcagacgcactggtacacgtagcttaaatcctggagccaaaatatgagtacagcgtccatcacatcctactcctatggctggtgaacttgtagctatgggagaagaaactgaaggcatagtacagtttcctaaagatgaaaaacaatattatgttcccctctgttttggttattacagagaataacctgtttactaatggtcagtacctgtgtctctgtgtctgatgccaagaataaattcatcatctgcatagccaccactgcaacagaagccaactgcagtcaatgttggctatgcgtggaattgccagaggccaccaaaaatgggctacgttggagaatcgtccctgtaccttactgcataccgaatgttgtgtgtatatccctgacaattctcacactacgactctccttgcacagccatggtgggtgtggttttcattaactgtgcttttaattctcctgtgcttacactgaatctgtaatctgtataaagtatgctttccccaagtatctgtaagggtattttcctacaattgagtatcaaattgaagccaaatttggaagaaaagttaaatactcaattttatctcaattgaacatggacacaaacaatggtcaccaagtcccggaacaggttctgtgagtttcttcaggcgttcatccaccagtgtctcagagaaatttctattttaatctgttcctgtatgttagttattgaaaaacaacagacaatcgccaaaaatttgacatttttgtggtttttgagcccagtagtgaagagtcctcgttacccggccttatgccaaagaactccttacaaaaagagctagggtcccagatggcactagagcttcctgagacctctccccatctctgcagggatgaggggccaactctgtagcccaggctgttgcttcccggtctgttgatgaatcctccatagtctggtgagtgtagtgtctgactctggagcccaggctattgcttctctgtctggtgatgcttcctccatactctgtagtctgctgtgtgtaaacatatgtatatatatatatatatacatatatatgtatataatttatacatataactgtaaataaaaataattatataattatgtacataattatttaaataaataaatgtaaataaatacatatataattatatatatataatatatatatttatatatataaaaaatatatatattttttcccttctcatatcaatttgcttatcatatcatttacttattatatctgtattgccatataattgagacaaaagatgtttacccttaaaagtattgtgtgtgccttttcttcttcctcatggatctcccatgcagaacacatgcctgacaaatttttatatttttagtggagactgggtttagccatgttggccaggctgatctcaaactcctgacctcaggtgatccttccatctcggcatcccaaagtgctgagattataggcatgaaacacccagccaggaggaggcatttctacaaagaaaacatacaaatggcaaacagacatataaatgttgctaaacatcattaaacctcagagaaatgcaaatcagaactacaataagacattatctcactccagttaaaatgtcttatatcccaaagacagacaataacaagtgctgacgaggatgtggagaaaactttagtgcactcttggtgggaatgtaaattagtataaccactataaaaaagtgtggaggttcctcaaaaagctaaaaattgagctgccacagctacaatgcaacccaacaatcccagtgatgggcattgacacaaaagaaagaaaatcggcttgttgctgcactgtttacaatagctaagatttgaaagcaaactgtctacaaatgaatgaatgtataaaaaaagtagtacatatatacattggagtagtattcagccataaaaatgagattttgtcttttacgacaacgtggataaaagagaagagtatgttaagtgaaataagccaggcacagaaagataaacactgtgcgttctcacttattcgtgggatggaagaattaatacaactgaattcacggacatagagagcagaaggatggttttcagaagctaagaaagacagtggaggctgggggaaaggtggggactgttaatgtgtacaaaaaaatagaataaataagacatattatttgatagcacaacgagatgactctggtcaataataatgtaattgtacattttaaactagctaagaaggaataatcagattttaacccaaagaataaatgcttgagtgggtgggtatcccattctctatgatgtgattattatgcattgcgagaccgcatcaaaacatctcatgaaccccataagtatatacacctacaatgcatcctcaaaaattacaaattaactgaagtaaataaaataaaactatttaaaaataaaatatcataacattaactagccccagaaatataagattttaatgaaataaaaatgcctctataataatcaaacagtgagaagaaagtcacactttactcctatttttgtttctgatctatcttctatctagtttcaagttgtagaattttcttttttcatttctaattaaattttattttattttatttttttattatactttaacttttacggtacatgcgcacaacatgcaggtttgttacatatgtatacatgtgccatgttggtgtgctgcacccagtaactcgccatttaacattaggtatatctccaaatgctatccgtcccccctcaccctaccccacaacaggccccggattgtgatgttccccttcttctgcccatatgttctctttggtcaattcccacctatgagcgagaacatgcggtgtttggtgttttgtgcttggatagtttgctcagaatgatggttccagcttcatccatgtccctataaaggacatgaactcttcattttttatggctgcattttgttccatggtgtatatgtgccacattttcttaatccagtctatcattgttggacatttgggttggttccaagtcttcgctattgtgaacagtgccgcaataaacatacttgtgcttgtgcctttatagcagcatgatttatactcccttgggtgtatacccagtaatgggatggctgggtcaaatagtatttctagttctagagccctgaggaatcgccacactgacttccacaatggttgaactagtttacagtcccaccaaccgtgtaaaagtgtttctatttctccacatcctctccagcacctgttgtttcctgattttttaatgatcgccattctaagtggtgtgagatggtatctcattgtggttttgatttgcatttctctgatggccagtgatgatgagcatttttccatgtgtctttttgctgcataaatgtcttcttttgagaagggtcttcatatccttcacccactttttgatggggttgtttttttcttgtaaatttgtttgagttcgttgtagattctggatattagcccttcgtcagatgagtagatggcacaaactttctcccattctgtaggttgcctgttcagtctgatggtagtttcttttgctgtgcagaagctccttagtttaattagatcccatttgtcaattttggcttttgttgccattgcttttggtgttctagacatgaagtccttccccatgcctatgtcctgaatggtattgcctaggttttcttctagggtttttacggttttaggtctaacatttaagtcttgaatccatcttgaattaatttttgtataaggtgcaaggaagggatccagtttcagctttctacatacggctagccagttttcccagcaccatttattaactagggaatcatttccccatttcttgtgtttgtcaggtttgtcaaagatcagatggttgtagatatgtggcattatttctcagggctctgttctgttccattggtctatatctctgttttggtacaagtacaatgctgttttggtcactgtagccttgtagtatagtttgatgtcaggtagcgtgatggctccagctttgttcttttggtttaggattgacttggcaatgagggctcttttttagttccttatgaactttaaagtagttttttccaattctgtgaagaaagtctttggtagcttgatggggatggcattgaatctataaattaccttgggcagtatggccattttcacgatattgattattcctacccatgagcatggaatgttcttccatttgtttgtatcctcttttatttcattgagcagtggtttgtagttctccttgaagaggtccttcacgtccttgtaagttgggttcctaggtattttattctctttgaagcaattgtgaatgggagttcactcacgatttggctctctgtttgtctgttattggtgtataagaatgctaatgatttttgcacactgattttgtatcctgagactttgctgaagttgcctatcagcttaaggagattttgggctgagatgatggggttttctagatatacaatcatgtcatctgcaaacagggacaatttgacttcctcttttcctaattgaataccctttatttccttctccttcctgattgccctggccagaatttccagcattatgttgaataggagtggtgagagagggcatccctgtcttgtgcctgttttcaaagggaatgcttccagcttttgcccatttagtatgatattggctatggctttgtcagagatagctcctattactttgagatacgtctcatcaattcctaatttattgagagttttttgcaggaagagttgttgaattttgtcaaaggccttttctgcatctcttgatatctcaagataatcacatggtttttttgtcattggttctgtttataaggtggattacgtttgttgatttgtgtatgttgaaccagccttgcatcccagagatgaagcccacttgatcatggtggataagctttttgatatgctgctggattcggtttgccagtattttattgaggatttttgcatagatcttcatcggagatattggtctaaaattctctttttttgttgtgtctctgccaggctttggtatcaggatgatgctgtcctcataaaatgagttagggaggttccctctttttccattgattggaatagtttcagaaggaatggtaccagctcctccttgtacctctggtagattttggctgtgaatccatctggtcctggactttttctggttggaaagctaattattaattattgcctcaatttcagagcctgttattggtctattcagagattcaaattcttcctggtttagtcttgggtgggtgtatgtgtcgaggaatttatccatttcttctagattttctagtttatttgcatagaggtgtttatagtattctctgatggtagtttgtatttctgtgggatcggtggtgatatccccttgggtttaataaacagataacatcaaacattcaactaatccaataaaaagaaattttattcatttgagaatgtgttttccagagcatacttatatattacgttttaacttcataatttatattttataaaaacataactaattcaagttaatcttctctaatttttaattcaattgaatttttatcaggatcactatatttaaacaaaaattacctgaatttttcacatcataatttatagattctgcttctacaaattgtctgtagggaccattatttctacacggtctactttcctgggttaagtggtggatacccaaatgttttttggaataatgttttcttatatcagtttttagtcagtgatacgttgcaccatgtttaattttaagcattatcagttttcttttttttttttaattgatcattcttgggtgtttctcgcagagggggatttggcagggtcacaggacaatagtggagggaaggtcagcagataaacaagtgaacaaaggtctctggttttcctaggcagaggaccctgtggccttccgcagtgtttgtgtccctgggtacttgagattagggagtggtgatgactcttaaggagcatgctgccttcaagcatctgtttaacaaagcacatcttgcaccgcccttaatccattcaaccctgagtggatacagcccatgtttcagagagcacagggttgggggtaaggtcacagatcaacaggatcccaaggcagaagaatttttcttagtacagaacaaaatgaaaagtctcccatgtctacctctttctacacagacacggcaaccatccgatttctcaatcttttccccacctttcccccctttctattccacaaaaccgccattgtcatcatggcccattctcaatgagctgttgggtacacctcccagacggggtggtggcagggcagaggggctcctcacttcccagtaggggtggctgggcagaggcgcccttcacctcccggacggggcggctggccaggctgggggctgacccccccacctccctcctggacagggcggctggccgggcgaggggctgaccccctcacctccctcccggatggggcggctggccgggcggggggctgaccccccacctccctcccggacggggcggctgactgggcggggggctgacccccccacttccctcccggatggggtggctggccgggcagaggggctcctcagttcccagtaggggtggccgggcagaggcacccctcacctcccggacggggcggctggccgggcggggggctgacccgcccacctctctcccccccagaaggggtggctggccgggcggggggctgaccccccacctccctcccagacggggcggctggccgggcagagaggctcctcacttcccatcaggggctgccaggcagaggcacccctcacttcccggatggggcggctggccgggtggggggctaacccacccacctccctcccggaggaggcggctggccgggcgggcggctgaccccccacctcccttccggatggggtggctggccaggcggggggctgacccccccacctcactcccgaacgaggtggctgccgggcggagacgctcctcacttccgagacggggtgactgccgggcggaggggctcctcacttctcagacggggtggttgccaggcagagggtctcctcacttctcagacggggcggccgggcagagacattcctcacatcccggacggggcggcagggcagaggtgctccccacatctcagatgatgggcggccgggcagagacgctcctcacttcccagatgtgatggcggccgggaagaggcgctcgtcacttcctagatgggatggcggccgggcagagacgctcctcactttccagactgggcagccaggcagaggggctcctcacatcccagacgatgggcggccaggtggagacgctcctcacttcccagacggggtggcggccgggcagaggctgcaatctcggcactttgggaggccaaggcaggctgctgggaggtggaggttgtagcgagccaagatcacgccactgcactccagcctgggcaccattgagcactgagtgaacgagtctccgtctgcaatcccggcatctcgggaggccgaggctggcggatcactcgcggttaggagctcagcccggccaacacagcgaaaccccgtctccaccaaaaaaatacgaaaaccagtcaggcgtggcggcgcgcgcctgcaatcgcaggcactcggcaggctgaggcaggagaatcaggcagggaggttgcagtgagccgagatggcagcagtaccatccagcttcggctcggcatcagagggagaccgtggaaagagagggagagagagaccgtggggagatggagagggtgagggagagggagagggagagggagagctatcagttttctttcttgtgcattattttcacagtaatataaattatggacatcaaaatatcctcagggttaaaaacgttggagtccaagcattctatattcttgatttgtatggtttcacttatgactcagcattttaggaaaacattggctctataatctgtcaccctcaccccatttaaataaaaacatacttttttggacacaaggatcaggcatacacatctacacagtggatcacatcatttttgggggcaaactgaaaactgtttttatactcaaacatactgttgggaaactgtgaaataaaaatttctgatgtttgttaaaaattgggaagaaagacattaatactattgtagtagattttatggccatcgtaatagggttcagttcagaaattgatcataactctgaacacagacaacgaagaatttatagtcaataagcagaataaatcagtggataaaaattattgaaaaacatttgataaaataccaaaggaggaagaggaactttttatagcagaaggctggttacaggttggctaaggacttaaatatcaaagaaagggaatcacgatattagtagacataagggatatgtggatttttactaaacagtattagcaggatttatgaaagtgagcctctcaaaccaggagcagggcaagaagtcaaggttggcttagtcaaaaagagggttcagttaagcttgactaacatttggtcataaagggagtgcttacaagaacccagatttttttcccatctgatctgaaaataaataatcaccaaaaaaggctttgtttgaaaaatgagtgcccacttcacctgagaaaacctccatcttcttctgtttacctttgaatttagtgtagaaaaagagcacttgtcatcgccacagttttaattttgctttcactcttaaaaacagagagtcagggctgggtgtggttgttcatgcctgtaatcccagcattttgggcatggtgatgcaagcacacctgtaatcccagctacttgaaaggctgaggcaggagaatcacttgaacccaagagtcagaggtttcagtgagccaaaatcacaccactgcactccagcctggtgacagagtgagactccatcaaacaaaacaaaacaaaacaaaacaaaacaaaacaaaacacaaaattagaaatttagttttattcaaacagcaacttacaaacacaaaggttatagtttctgacccctattcaagacaattggttgtaaccataagtattgatgggacttcagggagattcctcagatggagctgatgcagctgtgcaagccactttgaccttgcatctttcctacttcttagcctttgaaatggacatggttgctggtgcaggcttgtgctcctacagccagccatatgggaccatgagacagcctacaggataaaaaccatctactgaaatattgtagcaaagtgtgccaagagggttgactagaagtagctatggtgtgtggctttcatgaaaagaaacaaagagggaaaataaatacagcaccatcaactgaaacacccagatatttgcagtgggactaatgaaggaaacagctcaacccatgggaaaaagaagggcatggcaaccgcccacccgggagtaacacagaccaaagggaacctaccctgcccaaggaagtggtgagcaaatacgtgaccctgagaaaccacacttctcccatggatctttgcaactctcggatcaggagattttctcgtaaacttattccaccagggcctttggtctgatacacagagctgcgtgttcccggcagaacaactgctcagacacaaacagaatcgcaggagctttacatattttggctctgagatctctggcaaaggtgactgcaactcagacaaggtgggaggttggatctccgtaaatgcccctagaaaggaagctgaatccatgggcctgagcagcatcagtgggccccacttccatgacgcctcacaggataagatcaactggcttggaattccatccagcccccagcaacagcattgcaattacctgggatggaacaacgttcctggaggcaggggctggctgctatatttgctgtttggatgactcagccattccagcctggaggtttaggagagttaaaaaaaaaaaaaactcatggcagatggaagaaatcccttagcacggcacattggccctcccaaagtttggccggactacttcttgaagtgggacccagatacctttttcatctcagagtggggcctcctaccagagcctccagacagccccttccatattctccggcaggcagagttttgatttattcctggatgcagtgcacattgggagcagtgggtcttcatatttgttgtttggagaactcagccataacaatcagtgggcttaggagagtccaaaccatcccagggaagaaggaatcccccagcatagcacagtggatctgccataatgtgatcagattgcttctttaagtgggacctaatatgctctgcatctctgggtggaacttcccaaccagggcctccagcaactcccactgatgttgtctggctggcagaggtttaaaaacttcctgggccagagttcctagagagaggggttggccaccatctttgctgtttcagccactttgctgtttcagcctccaggctttggagagcccaatctgatgaagggcagaaatggtaccccgcacagcatggctgatctatgaaagtggggctagatggcttaagtgggtccccaatcctattcctcctagctgggtgagacctaccaactggggtttccagtcacctcctacaggtgtgttcgagccctcaacatgtctgcacccgccctgggatggagctcccagggaagggagtgggctgctatctttcttgtttcacagccttcactggtgatacccccagatactggaaaatccgaggtgacaagagagtggagcagatgcccaacaaactacagcagccccacacaaaatggccaaacagttaaaaggaagagaaacaaacaaaaatctcattcaaaggccagcaacctcaaagattaaagatagataggcacacaaaggtgagaatcacaacaagaatactaaaaactcaaaaatcagggtgctctccctctcccaaatgaccacactacttctccagcaagagttcagaataagggtgaggctgtgatccctgaaataacagaagtagaccccagaatgtggataaaaatgaacttcactgatctaaaggagcatgctctaactcaatacaagaaagctaaaaattacaatataatattgcaggagctgacaaacaaattagccaggatagagaggagcctaaccaacccgatagcactgtaaaacacaatacaaaaatttcataatgcaatcacaagtattaatgaggaaagaaactcagagcttgaagtttgtatttctgaaagaagacatgcagagaagaatagaaaaaaagaatgaaaggaataaacaaaacctttgagaaatatgggattatgtaaagagaccaaatctacaactgattggtgtacttgaaagagctggggagaatggaaccaatcaggaaaacatatttcaggatatcatcaatgagaacttccccaaccttgctacactggccaacaattcagaaaatggagagaagttcagtaagatactccaagaaaaaatcatacccaagacacataaacgtcagattccccaaacttgaaatggaagaaaaaaaaagaaaaaaaagctcagccgcagagaaaagccaagtcacctacaaaaagaagttgatcagactaagagcagagctgtcagtgagaaccctacaagccaaaagagattgggggccaatatttaacgttcttaaagaaaataaactttaagccagaattttatatctggccaaactaagcttaatctggggagaaataacatccctttcagacaagcaaattccgagttaattcatgaacaccagacatgcttttcaagagctcctgaaggaagcaccaatttggaaagggaaaattattcccagccaccacaaaaacacactcaagtacacagaccattgacactataaatcaaccacataaacaagtctgaaaaataaaaataaccagctagcatcaagataacaagataaaatctacgcataacaatacttaccttaaatgtaaatgggataaatgccccagttgaaacacacagggtggcaattgtataaaaaccaagacccattggtatgctcttcaagacacccatctcacatgcggggacacacataggctaaaaataaagggatggaggaaatttcaccaagcaagtggaaaacctaaaaaagcaagggttgcagtcttactttccaacaaaacagactttaaagcaacacagattaaaaacaacaacaacaacaacaacaaagagggtcattacataacggcaaataattcaattcaacaagaattaactattctaaatatatatgcacccaacacaagagtacccagattcatataacaagtttctagatatcttgaaagagacttagaacaccacacaataatagtgaccgactttaacatcccactgacagtattagaaagattattgagacagaaaattaacaaagatgttcaggacctgaacttagctctggatcaaatggacatgatatatatttacagaactctccacatgaaaacagcagaatatacattcttctcatcactacatgacactttctctgaaattggtcacttagccagaagtaaaacactcttcagcaaatgcaaaagaactgaaatcataataaacagtggctcagatcacagcacaatcaaattaaaactcacgatgaaataatttactgaaaaccataaaattaaatggaaattgaatcacctgctcctgaataacttttgggtaaataatgaaattaaggcagatatcaaggagttctttgaaaccaatgagaacaaagacaaaacataccagaatctctgggacacagctaaggcagtattaagatgaaaatttatggcattaaatgcccacattaaaatgccagaaatgtctcaagttacaacttcacaacaaaaataactacaggaacaagagcaaagaagttctagagctagcagaagacaagaaataaccaaaatcagacctgaactgatggagatagggacaagagaaaccattcaacagatcaacaaattcaggagctgtttctttttctttgaaaaaaccaataatataaatacaccagtagtagactaataaggaagaaaatatcaaaaattaaaatgaacacaatcagaaataataagggttaccactgaccccacagaaataaaaataaccatcagaaaatatcataaacacctctatgcctataagataacaaattcagtagaaatggataaatttctggacacatacacccttcaagaataaaccaggaagaaattgaatccctgaaaagacaaacaacaggctctgaaattcaggcagtaataaatagcctacaaaccacaaaaagatcagaaacacaaagattaaaagctgaaggttatgacatttatgaagaagaactggtacaattcccactaaaattatttcaaaaaactgaaacagagggcttccttcccgactctttctatgagagcacatcatcctggtaccaaaacctggcagacacacaagaaaaaaaacaaaacttcaaaaaatttgcaagaagaaaacaaccccatcaaaaagtgggcgaaggacatgaacagacgcttctcaaaagaagacatttatgcacccaaaaaacacatgaaaaaatgctcaccatcactggccatcagagaaatgcaaatcaaaaccacaatgagataccatctcacaccagttagaatggcaatcattaaaaagtcaggaaacaacaggtgctggaggagatgtggagaaataggaacacttttacactgttggtgggactgtaaactagttcaaccattgtggaagtcagtgtggcaattcgtcagggatctagaactagaaataccatttgacccagccatcccatttctgggtatatacacaaaggactataaatcatgctgctttaaagacacaggcacacgtttgtttattgcggcactattcacaatagcaaagacttggaaccaacccaaatgtccaacaatgatagactggattaagaaaatgtggcacatatacaccatggaatactatgcagccataaaaaatgatgagttcatgtcctttgtagggacacggattaaattggaaatcatcattctcagtaaactatcacaagaacaaaaaaaccaaacaccgcatgttctcactcataggtgggaattgaacaatgagatcacatggacacaggaaggggaacatcacactctggggactgttgtgatgaggggggaggggagaaggatagcattgggagatatacctaatgctaaatgtcgagttaatgggtgcagcacacaagcatggtgcatgcgtacatatgtaactaacctgcacattgtgcacatgtaccctaaaacttaaagtataataataataaaataaaaaaagaaaaaaaaaaacttcatgccaatatttttgatgaacatttatgcaaacattcttaacaaaataggggcaaaccaaatccagcagcgcatcagaaagcttatccaccacaatcaagtaggctccatctgtgggatgcaactttaattcaacgtacacaaatcaatatgtgatttatcacataaacagaactaaagacaaaagccacatgattgtctgaatagatgcagataaatctttgcatccataaaattcaacatccattcttgtaaaaactctcaataaactaggtattgaaaaaaacatacttcaatataataagaaccatgtatgacaaacccacagccaatatcatactgaaagggcaaaagctgaaagcattcccttttaaaacgggcacaagacaaggatgccctctctcatgaatcctatttcagatagtattggaagtactgggcagagcaatcaggtaagagaaaaaggcattcaaattgaaagaaaagaaattaaacaacacctgatgtcagacgacatgattctatatcttgaaaacccctattgtctcaaccccaaagcttcttaagctgataaatatctttaacaaagtcccaagatacaaaataaatgggccaaaatcactagcactaaatccttatataccaacaacagtcaagccaagagcaaaatcgtgaatgaacactcattcacagttaccacaaaaagaataaaataccaaggaatgtatctaacaagagaagtgaaaggccactacaaggagaactataaaccacttctcaaagaaatcagacatgacataaacaaatagaaaaacatttcatgcttatggatagaaagagttaatattgttaaagtagacacactccacaaagaaatttatagagttaatagtatttccgttaaactaccaatgacatttttcacaaaactagaaaagctattttaaaatttatatggaaccaacaaaggcctgaatagtcaagacaaccccaaacaaaaagaactaagctggaggcatcacactacccaacttcaaactgtgctacagggctacagaaaccaaaacagcatggtactggtacaagaacagacacacagaccaatgaaacagaatagaggacccagaaataagactgcacacctacaactaactgatcttcgacaaacctgacaaaaacaagcaatgaaaaaacgactctgtactcaataaatggtgctgggataactgcctagccatgtgcaaaaaattgaaactgaaccccttcctccatcatcctctgcaactaacacaggaacagaaaactaaccaccgcatattctcactcataagtgggagttgaacaataagaacacatggacactggaagggaaacaacacaactggggctagtcagggaatgggagtcgaagggagggagagcattaggataactagctaatacatgtgggacttgaagcctggataacgggctgataggtgcagtaaaccaccatggcacacatataccaatgtaacaaacctacacattctgcacttgtacttcagaacccaatttaaatttaaaaaataaagaaagattccttacatcatatacaacaataaactcaacatggtttaaatgtaaaacccaagactataaaaactttggaagacaacctaggcaataccattcaggacataggcatgggcaaatattttatgatgaaggcgcaaaagcaattagaacaaagagaacattgacaaatgggatctaattaaactaaagagcttttgcacagcaaaagaaactatcaacagagtaaacagacaatgtatagaatgggagaaaatttttgcaaactgtgcatctgacaataatctaatttctagcatccataaggaacataaatttacacgagaaaaacaaacaaccttattaaaaattggccaaaggacacacagaaacacttcttgaaagaagacatacatgcagccaataagcgtatgaaacagaagttcaacatcagtgaccattagagaaatgtaaatccaaaccacaatgagatatcattttataccaggtataatggttaccatgaaaaaatcaaaaaatcacagatgctgacaaagttgtggagaaaaagcaacatttttaccctgttggtcgagttcaaacgttgtggaagacagtgtggtgattcttcaaagacctaaagaaaagaataccatttgacctagcaatctcattactgggtatatacccaaacaaatataagtcattctattataaagatacctgcacgcacaagttcatcacagccctattcacaatagcaaagacatcaaatcagcctacatgttcatcaataatagactggttgaagaaaacgtagttcatatacaacatggagtactatgcagccataaaaaagcacaagattatgtcctttgtagggacatggatggagctggaggccattatccttaaaaaactaacagaaacagaaaaccaaataccacattttctcacttataagtggagggtagatgatgagaacacacagaaacatggaggggagcaacacgcaccagggcctatcaggaggtagggggtgagaggagggagagaatcagaaaaaataactaatagttagtagacttaatacctgggtgataaaacaatctgcacaaccaaacttcgggacggtatgtttccatatttaaagaacctgcacatcctgcccatatacccctgaacttaaaacaaagttcaaaaaagaaaaacattttagcaaaatgacagactatttttgactaccttcgtgtacagttcagagtcagactgcccagctctaacatccttatttatgagaaagaaagcattctctctcttatctgcactattatattgggttttcttttttaatttttttgagacggagtttcactcttattgcccagactggagtgcaatggcgcgatctcggttcaccacaatctctacctcccgggttcaagcgattctcctgcctcagcctctcaagaagcagggattacaggcatgcaccactacgcctggaaaattttgtatttttggtagagactgggtttctctatgttggtcaggctggtcttaaactccagacctctggtgatccgtctgcctcaacctcccaatgtgttgggataacaggcgtgaactacagcacccggtctgggttttcttctatatgtaggaaaatgtaatcctaactaaagtgctagctttgccatggaatctctgtgtaattctggatgttatgtcactttcctaagacttttttctatctgcatagtggtggaggcagtagtggggaagatttaattatacaaagggtccatcaatccatgtgttaagtgaggatgtcactactttccagactcagaggacaggggacatattgttatgctccatggaagctgtttgggggtggaggtggggctcacttgcacacattgtctgtgggccttgaaagatcaagtgtgtatgacccttcttgaacagaaggtccatgtgcccagtgcagaacccatctatttcttcccaagtgaggaagatctgggaacaccctgatcacagccttgctacaccaatcctagttggtagggacgttagaccatatgcatgttgagctgtggcttaagcattttgacatctcacatctcattggatatctgaaaaactgaggtctggagagaagcagggactggcccagagatgatgaagtgggcagagtccaagggaaaaaagagcattctgacctcctaggccagggctcaacactctcatggggtttgttttgggaatgagtccctgagatcctggggatttttgccaattttctcgtcatatgaagcaaactcatgtctgcatcatagaattccacaggtttgtgcatacacacacagacttctcaggctaaaggtcataagaggagttaacgctgatggagtgatgagaagaaaaaagatagaggataggggcagctttgtcatggggtagaagcaccccatcttctggtaacatgcccaggacccataacatgggcaggggaaggcaataggctgatggcttgagaggctcaaggcttccatggatctgactgggctgcagccaacaccaggatagctttccaaggacaaaaccttactttctccattcattaatctgcataattaaaatggtaaggaatccccctacacccaatatggagaggaatacagtagtgaaaaccttcaatttttccctgtacaaattgacataattgaactgtgtgacccctaaatttgaaaggcttaaagaagtgagttgaccttgctgtctatcaattaccactgtactctcagaactttggaaattgctctgtgtcctccgaaggtctttcagagcagaaagtggcctaggggtgtgcgggactgagcactcaggctggtgtagaatgtgacagatcctcagaccactgctctgggatccaaggagaagaccttctcggtcagagctttggggatcttttttttggagggggcgatcttttttgaaagtggagacagaatcgttttccagggctccctcatttgccctcctgtttcatagtatttcttttttctgtctttctttctttctttctttctttctttctttcttctttctttctttcttctttctttttctttctttcttctttctttctttccttctttttctttctctttctttctttctccttcgtttcttttctttcttcctttctttcttctttctctttcttttgttcttccttcattccttccttccgtttctttctttcttctttctttctttcctcttccttcattccttccttccttttctttctttctttctttctttctctttctttctccttccttcctccctccctttcttttctttctttccttattttcttttttctttcttctttctttctttcttctttctttctttctttctttctttctttctttctttatcagagtctctctcttctcgctctttcacgggactggagtggagtggcatgatctcggctcactgcaacctccacctcccgggttcaagtgattcactgcaacctccacctcccaggttcaagtgattctcctgcctcagcctcctgagtagctgggaatataagggcgtgccaccaagcctggctaatttttgtattattagtagagacggggtttcgccatgttgtccaggatggtctcgatctcttcacctcgtgatctgcttgtatcagcctctgaaaaaaactgagattataggtgtgagccaccacacaaagcctacagtttatttttctttgcttgttaaaatgttttagtcagctaaaatttacacaatatagagttctacatactatctaatataaagtgtaaaattcagtgcttttcagtttatttacaatgctatgcaactgtcacccttatcaaattccaaaatagtttcatcaccctctcaccaaaaaaactccatatccattaagcagtaatttatcattcatccaccgaatttccttggtaaccactgattgactttctatctctagtactctctttctttctttccttttttttttttttttttggtgtctcactctgtcacccatgctagagtgcagtggcacgatctcggctcgctgcaagctccacctccctggttcacgccattctcctgcctcagcctccagggtagctgggactacagatgcctgtcagcacgcccagctatttttctttgtatttttagtagagacagggtttcaccatgttagccagcatggtctcgatctcctgacgtcgtgatctgcctgcttcggccacccaaagtgctgggattacaggcgtgagccatcacacccggcttctatttctagttttctattctagtcactttatagaaatataataatataatatgtgaccttttttctttggcttttctctttgagcgtgttttcattatttatccatgttgtggcacatatcagttctgtatttatttttatggctagctaatactccattgtataaataatattctattggccagggacgatggctcacacctataaactcagtattttgggaggctgaggctggtggatcacctgaggtcaggagttctagaccagcctggctgacatggtgaaacactgtgtctactaaaaatacaaaaattagccgggcgtggttcctgaaagcccaattgctcaggaggctgaggccagggaatctcttgaacccaggaggtggaggttacagtgagctgagatcgtgccactgcactccagcatgggtgacagagcaagactgtctcaaaaaaaaagaaagaaaatgagaggaaatatgtgcaaactacacagctgacaagcgattgataagcagaatacagaataaacaaaaaactaaataaaaaattagtttaactttaaaatgggcaataatcttcagaaacatttctggaaaatgtaaggggcataaacatagaacctaaaagttagagaagaattatgaaaaaactgaaggatatagaaaaaataatttcagactattcacattaaaatttaattagagagggggtggagccaagatgggcgaataggaaaagccttagtctagaactcccagcatcggcaatgcagaacacaggtgatttctgcatttccaactgaggtaccgggctcatctcactggggagtgtcagaaagtgggtgcaggacagtgggtgcagcgcaccccatgtgagccaaagcatggtgaggcatcgcctcacccaggaagtgcaaggggtcagggaataccctttcctagtcaaagaaaggggtgacagattgcacctggaaaatcgggtgactcccaccctaacactgtactgttccaaaggtcttagcaaacggcataccaggagattatatcctgcacctggctcagagggtcctacgcccacagagccacaatcattgctagcacagcagtctgagatcaaactgcaaggcaacaacaagcctgggggaggggcgcccaccattgccgtggcttgagtaggtaaacaaagcagccaggaagctccaactgggtggagccaactgcatctcaaggaggcctgcctgactctgtagactccacctctgggggcagggaatagccaaacaaatggcagcagaatcctctgcagacttaaatgtccctgtctgacagctttgaagagagtagtggttatcccagcatgcaactggagatctgagaacagacagactgcctcctcaagtgggtccctgacccccgagtagcctatctgggaagcatccccagtaggggcagactgacacctcacacggccgggtactcctctgagacaaaatttccagaggaacaatcaggcagcaatatttgcttttcaccaatatccgctgttctgcagcctccactgctgatacccaggcaaacagggtctggagtggacctccagcaaactccaacagacctgcagctgagggttctgactgttagaaggaaaactaacaaacagaaagtacatccacaacaaaatcccatctgtacatcacaatcatcaaagaccaaaggagagaaaactacaaagatggggaaaaaacagagcagaaaaacggaaaattctaaaaatcagagtatctctccacctccaaaggaacacagctcctcaccagcaatggaacaaagctggacagagaatgactttgacgaattgagagaagaaggcttcagacgatcaaactactccgagctaaaggaggaagttcaaacccatggcaaagaagtgaaaaacctttaaaaaaattagatgaatagctaactagaataaccaatgcagagaagttcgtaaaggacctgatggagctgaaaaccaatgtacgagaagtacgtgatgaatgcacaagcctcagtagccaattcgatgaactggaagaaagggtgtcagtgatggaagatcaaatgaatgaaatgaagtgagaaaagaagtttagagagaaaaagataaaaagaaatgaacaaaacctccaagaaatatgggactgtgtgaaaagaccaaatctacatctgattggtgtacctgaaagttatgaggagaatggaaacaagttggaaaacactctgaaggatattatccatgagaacttccccaatctagcaagggagggtgacattcaaattcaggaaatacagagaacaccaaaaagataatcctcaagaagagcaactccaagacacataattgtcagattcaccaaagttgaaatgaaggaaaaaatgttaagggcagccagagagaaaggtcgggttacccacaaagggaagcccatcagactaacagctgatctctcggcagaaactctacaagccagaagagtggggaacaatattcaacattcttaaagaaaagaattttcaatccagaatttcatattcattcaaactaagcttcataagtgaaggagaaataaaatcctttacatacaagcaaacgatgagagattttgtcaccaccaggcctgccctaaaagagctcctgaaggaagcactaaacatggaaaggaacaaccggtaccagccactgcaaaaacatgccaagttgtaaagaccatcgaggctaggaagaaactgcatcaactaacgagcaaaataaccagctaacatcataatgacaggatcaaatgcacacaaaacaatattaaccttaaaagtaaatggactaaattctcccattaaaagacacagactggcaaattggataaagagtcaagacccatcagtgttctgtattcaggaaacgcatctcacgtgcagagacacacataggctcaaaataaagggatggaggaagatctaccaagcaaatggaaaacagaaaaaggcaggggttacaatcctagtgtctgataaaacagactttaaaacaataaagatcaaaagagacaaagaagtccattacgtaatgataaagggatcaatgcaataagaagagctaattatcctgaatatatatgcacccaatataggagcacacagattcataaagcaagtccttagagacctagaaagagacttagactcccacacaatagtaatgggagattttaacaccccactgtcaacattagacatatcaatgagacagatagttaacaaggatatccaggaattgaactcagctctgcaccaagcagacctaatagacatctacagaactgtccaccccaaatcaacagaatatacattcttctcagcaccgcaccgcacttattccaaaattgaccacatagttggaagtaaagcactcctcagcaaattgtaaaagaacagaaattataaaaacctctctctcagaccacactgcaataaaactagaactcaggattaagaaactcactcaaaaccgctcaactacatggaaaccaaacaacctgctcccgaatgactactgggtacataacgaaacgaaggcagaaataaagatgttctttgaaagcaacgagaacaaagacacaacataccagaatctatgggacacattcaaagcagcgtgtagagggaaatttatagcactaaaggcccacaagagaaagcagagaagatctaaaattgacaccctatcatcacaattaaaagaactagagaagcaagagcaaacacattcaaaagctagcagaaggcaagaaataactaagatcagagcagaattgaaagaaatagaaacataaaaaacccttcaaaaaatcagtgaattcaggagctggtttttgaaacgatcaacaaaattgatagactgctagcaagactagtaaagaagaaaagagagaagaatcaaatagacgcaataaaaactgatcatttatgtggctcaagttctctaatataacatagtacggtcaaaatggaagggtaaaaattgcaagaccaccttaacgtttgtcatcttaagtgtactataaaaatgccttttaaattaattcagtgaataggtttttaagtgcatgttttagattatgctgaactgtcaaataccagcacatccctaatttgcagtagattaacagcactttttagcacacatcacagagttgttcggtggccaaattgaaaaggcacctcctctccatgtggtcattcagaaactcaaagttctttcattatttgtcttcatcatccatgagtcgtggttgccgtttgtgttcagtcccctgaaaataaagtactttaagaaatgcatgcgagaagacttgatggactcatcttaatgtgactcacatccatctcactctacaaccattaacaataactggtcacgtttccacatctcatgcaaatgaggctaagaaatgtaattctgctgtgtccctaataaatgggagaatagaatttgttgaatgaccagagttttccgtaacattgtgtcactcatatggatttactgtgtttctcaaatatttattaaacatctgtcatagccaagcactgtgataaggagtacagggaggacagagagctgactcagcagagtcctagtctgaaagaaactcacaatctaagaaaataagaaaagtcatgttaggtgctgctataaaggcacatgcacacgtatgtttattgtggcactactcacaatgcaaatacttggaaccaaccgaaatgtccaacaatgatagactggatcaagcaaatgtggcccatatacaccatggaatgctatgcagccataaaaaatgatgagttcatgtcctttgtgtgtacatggatgaagctggaaaagataattctcagcaaactatcacaaggacaaaaaaaaacaaacaccacatgttctcgcttataggtgggaattgaacaatgagaacacttggacacaggaagggtaacattacccactggggaatgttgttggggggggaggggggagggatagcatttggagatatacctaatgtaaatgacgagttaatgggtgcagctcaccaacatggcacatgtatacataagtaacaaacctgcacgttgtgcacatgtaccctagaacttaaagtataataaatatatgtataacatacgtatatattatatacatgttcaagggattctcctgcctcagcctcccaagtagctgggattacaagcgctgccattactcccagctattttttgtatttttagtagagaaggagttttgccatgttgaccaggacggtctggatctcctgacctcatgatccacaccccttggcctcccagagtgctgggattacaggtgtgagccacagcccccggcctatatgagttttcaaatagttttttctagctccgtaaaaaatttcattggcagtttgatggaaatagtattaaatctgtaaatttctttgtgaagtatagccattttagtgatattgcatcttcctatccgtgagcatgggatggttttccatttgtttgtatcttctctgatttctttgagcagtgttttgtaaatctcattgtagagctctttcacctccctggtgagctgcatttccagatattttattattttagtggcaattgtgaatgggatggcctttctgattttgctgtcagtgtggctatcgttggtgtagaaaaatgttagtgatctttgcacattgatttagtatcttgaaactttgctgaagctgtttgttaactaaagaagctttgtagatgaaactacagggttttctagatagagaattatgttatctgcaaacagaaatagtttggctttctctcttcctatttggatgttcttcggatttctttctctagcctgattgctctggtcagtactgtcaatactaagttgaatagaaatggcaagagagggcattcttgccttctactggttttaaaaaataatgttcccggcttttgcccattcaacacattgttggctgtgggtttcttatagacggcttttattattttctgcgtctattgagataatcatcttttttttgtttttagttctgtttatgtaatgtattacatttattgatttgcacatgatggaccaaccttgcgtcctaaggaggaagcctacttgatcatgacggattacctgtttgatgtgctgctggatttgcctcccaaatattttgttgagaacttttgtattgatgttcgtcaagaatgttggcctgaagttttctttcccttctttctttttttttttttttttgacggtgtctccctctgttgcccaggctggagtggattgcactggcgcgatctctgcttaatgcaatctctgcctcctgagttcacgccattctcctgcttcagcctcccaagtagctgggactacaggtgtctgctaccaagcccggctaattttttgtgtttttgttgtgtctctgcctgttttggtgtcaagatcatgctgtcctcatagaatgagttggggagaagaccctccttctcaatttttgggtatagtttctgtaggaattgtaccagctcttctttgtacatttggtagaatttggctgtaagtccataaagtccagagcttttttttttgattggcaagctacttattacctatttaatatcagagttttttactggtctgttcaggaaatcattgtcttcctggcttaatcttgagagagtgtgtatatctaggaatctatttatttcgttaaagttttctagtttgtgtgtataaagttgttcatgttagtgctgtccccagttaaataaaaacaactattagaaaccactaaagtttaacacttgtttttatatctttaatcaatttttatttaatttttctacttggaatgtgataaagattcaactttactggtttaaatgtggacttgttttcccagcatttcttgtgtaacaaactgtctttacataatgattaagacacacttttaaaaagacaaacaataatttatgaaagggttttttggagtatctattttatttatttgatctccacaattgttcttatgccactatcaaactgttataattttagtagctttttatgttttcaaatttaaaattgtgagccacctaattttgtccttcttttcaagattattctgtacattcagaggatgttcaaattccatatgaagttttaaatgagctattttctttttgcagaagaaaagttggaaaaatgaaaacttgggattacagtacatctgtacactcctttgggcagtggtattgtcatcttaacttcattaaatcttccggttcaggaacatggaatttgttgccagttatttaagtcctttttagtttttttcataaacattctgatcctgtattttttattgtacaagatatttacctccttattaaatttattgctaagaattatattattttaatgttgttgcgaacaattgttttcttaatttactgtcaaattgttaattgtatatggaaatgcagtttatgtttctgtgttgtaaaaataattatttcatgtctcaaatctagattagcaattcattcagaataaatatgctgtatatattactagtcatttaactttttccaataagctaaccaatttcaatatgtctaaatatgtaaaaatgttaaattgtgttagatttttcacttactctcacctgtcatttatctgtcagaattacattactgcgcactagaactttcatttctggggccgggcacggaggctcatgcctatattcctagcactttgtgaggccaaggcaggcggaccacctgagatcaggagttcgagacctgtctggccaatatggtaaaaccccgcctctactaaaaatacaaaaataagctgagcgtggtcttgggagactgtattcccagctactttggaggctgacactggagaatcacttgaacaatcccacgacacaaaacaaccgaggttagtcttcatgtcgaaagtcttcaatggattgtcttttatcacaggattgcttagtgcaacatttaatgggaaagatgcatgctactgagatgtagttctccacaagtctcttagagtttgttgttttgttgtggattacatcacatacctgtcctgttccacgttatttttcaaagatttttgtacacaaataacctggaaaaagggtagtagtttttctcttcaggtgaatggcagataaattactcaatcaatataataaagacaatttttctttgtgacgcaaaggttggacaggcttccatgtaacctactttaaaaagattgaggtttcttagtcttgagtctgctcagctatgacacaaatcttccccatgtacaatgtccatatgagccttttgaaatccttcaaaaaacgtagtatggacaaggagaactaatacaaatatgaggcttttgcctccaggtaagcagtaaatagtaggtattttttttcatacttcagtgtctcatgccttctaccagcatcgatgaaaatggaaggttaatatgttgtttacaaatgctataaaatcttagatacgtcacaattatttaattttggagatgactatggcatgctgagataaacacaactttctgaaaggggaaaaggaacaaatacttgaagagcttgcaagggatatgagaagttcccccaggaccaacagcaaattctctcggccaagtggttagtttggtgaagcaagagatcaagactctgctgtctgctaatgagactgatccttgagaggattataacaatgaacctgagagctttgcatgttcacttttctcctgctggaaaatcaaggagctcttaaagctaatgttgaggtttggatgagtccaaaacagtagaagttcatgtggttcagctgtgagcagcaaaaagactgcaaaaagccacattaagcaggttttgtaagtctctcctttacccacatgaaggaacccattccctctgcacttctaatttttgtcctttgtctacagctaacttcagcaactttaaatattaaactacatacgattggaggtttggatgggggaacacaaatgtatgtagttcctttggatatatgtatctaattcaccattctgtggagtcccttagggtgcacagggagatataggtgttagggtggctggaaatgctgacaaacctatcattctattaatccagttgcttccagataatggaaagcatggtaagtccactgacatccgtgaagatgagcacactgctacactttggctgtgaagtgagtttcttggtctgagcaatgctaagtggaatatcatagggatggatgagggattctgtgagtccatggagggtagttttggcagaattccacccagggaaagcaaatttgtatccatagtaagagcctactccagtgagtacaaactgttgccgcctatattataaaagttattcaacgtaataaatttactaccaggtgcctggtggatcaccctggaaatgatgtcatatcaaagactcagtgtagatctgtgctgctgtcaaattaaacattcagaattgactgtagccagactggcctttgggattcaaagttcatattgcttagcccgtgcattgcttctatttctgctactatgttcaccttgtttataagcccattgggtgatgatgggggtgacagggaagtaagaatgacccatactcacggaacaagacattctgtccacatcattatcaaaatcatgctctgatacggttaccccttagtagggattcatatagaacagacatatctttatgtaatttacccagtgagagaagtttatccacaaaagtttttctattttttttttttgccaggaattttgtaatcatgttccttccgtgtcattggtcatgtagccaattcatgggccacagcagtgttgcaggagtgagtatcataggatctcaaactcctgttcttaagcaatccttgcctcaacctcttaagtagctgagactataggtgcaccccacaacgcctaactaattttgttttatttttagtagagattagattttgctatgttttccaggctgttctcacactccccacctcaagcgattctcccagctttgcctgcaaagtgctttgactagagtcaaacctccacacccagcacctataatttgatattttaaacaatactatgtagcgaaagcaattacgaagttatctagggaaagaaagctcactatcacagtgtaaaattgtatagatatgatgcgggcatgtgtgtatacatgcttgcttgtgtgcataggtgcgtgttttctgagaaatggtaccttattgctaccaggctaggatagcattcatgttcttctgaagatgtcaaatattgaagctccaggattcatagaacaagattcctaagtggttcacgagagggtgaacgattgagtaatgggtattttggaagaaacaactggcctagggacaagaataagtgtgcaaatcatctgtgtgaaacacgctttcttcggagcacgcatttcatgcacttcattctactgtgacagatattgctactctgagtttgggagagattgaacctagggtctactgtgaaactctgtagactagacttctgtctgaggcagcccctgcctgtaaccgtaacctgcgccaaactccaatggagcattcttctcaatggataaatggaaattccggatgatccgatgggcagagagtgcgactgtttttttcaggagctctggttgaatggttttggggactttctgggaggatgctctgcacccagaaaagtagtccaacgggaatcatgagaaaatgggcgactccgtgtgcctccgtcccctcctacttcctcacccacccctccatcagggatcccacgtattccaggatgacacgtgttttagttgtctttgggcgacaactagcggcaaccgttattgaaaatgtaagctgtagagaacaaaaaaactctggtcgcctgttcacagctcactcactgcaacgttgaatcctgggcttaagcaatcctcctgcctcagcttcctgagtagctggaaatataggcatgtgccacaatgctgggcaatatttttaagtagtggtaatctctctcgatgtgttgcccaggttagtctcaaactcctgtcctctatccagcctcccaccttggtcttcagaagtcctgggattacaggcttgagccactgtgctcactcctataatttgatgttttcaacaatactatgtagtgaaatgcatcacgaagacattttgcaaaagaaagctcactatcacatataaagttgtatacttgtcatgtgcttacgtgagcgcatgttcttgcctgtctgaatgttttctgagaactgatcatcttttccccagggacactggttgaagagctgcggggattgtctgggagggtgtctcgggcccggaaacgtaatccaggagagatcnnnnnnnnnnnnnnnnnnnnnnnnnnnnnnnnnnnnnnnnnnnnnnnnnnnnnnnnnnnnnnnnnnnnnnnnnnnnnnnnnnnnnnnnnnnnnnnnnnnnnnnnnnnnnnnnnnnnnnnnnnnnnnnnnnnnnnnnnnnnnnnnnnnnnnnnnnnnnnnnnnnnnnnnnnnnnnnnnnnnnnnnnnnnnnnnnnnnnnnnnnnnnnnnnnnnnnnnnnnnnnnnnnnnnnnnnnnnnnnnnnnnnnnnnnnnnnnnnnnnnnnnnnnnnnnnnnnnnnnnnnnnnnnnnnnnnnnnnnnnnnnnnnnnnnnnnnnnnnnnnnnnnnnnnnnnnnnnnnnnnnnnnnnnnnnnnnnnnnnnnnnnnnnnnnnnnnnnnnnnnnnnnnnnnnnnnnnnnnnnnnnnnnnnnnnnnnnnnnnnnnnnnnnnnnnnnnnnnnnnnnnnnnnnnnnnnnnnnnnnnnnnnnnnnnnnnnnnnnnnnnnnnnnnnnnnnnnnnnnnnnnnnnnnnnnnnnnnnnnnnnnnnnnnnnnnnnnnnnnnnnnnnnnnnnnnnnnnnnnnnnnnnnnnnnnnnnnnnnnnnnnnnnnnnnnnnnnnnnnnnnnnnnnnnnnnnnnnnnnnnnnnnnnnnnnnnnnnnnnnnnnnnnnnnnnnnnnnnnnnnnnnnnnnnnnnnnnnnnnnnnnnnnnnnnnnnnnnnnnnnnnnnnnnnnnnnnnnnnnnnnnnnnnnnnnnnnnnnnnnnnnnnnnnnnnnnnnnnnnnnnnnnnnnnnnnnnnnnnnnnnnnnnnnnnnnnnnnnnnnnnnnnnnnnnnnnnnnnnnnnnnnnnnnnnnnnnnnnnnnnnnnnnnnnnnnnnnnnnnnnnnnnnnnnnnnnnnnnnnnnnnnnnnnnnnnnnnnnnnnnnnnnnnnnnnnnnnnnnnnnnnnnnnnnnnnnnnnnnnnnnnnnnnnnnnnnnnnnnnnnnnnnnnnnnnnnnnnnnnnnnnnnnnnnnnnnnnnnnnnnnnnnnnnnnnnnnnnnnnnnnnnnnnnnnnnnnnnnnnnnnnnnnnnnnnnnnnnnnnnnnnnnnnnnnnnnnnnnnnnnnnnnnnnnnnnnnnnnnnnnnnnnnnnnnnnnnnnnnnnnnnnnnnnnnnnnnnnnnnnnnnnnnnnnnnnnnnnnnnnnnnnnnnnnnnnnnnnnnnnnnnnnnnnnnnnnnnnnnnnnnnnnnnnnnnnnnnnnnnnnnnnnnnnnnnnnnnnnnnnnnnnnnnnnnnnnnnnnnnnnnnnnnnnnnnnnnnnnnnnnnnnnnnnnnnnnnnnnnnnnnnnnnnnnnnnnnnnnnnnnnnnnnnnnnnnnnnnnnnnnnnnnnnnnnnnnnnnnnnnnnnnnnnnnnnnnnnnnnnnnnnnnnnnnnnnnnnnnnnnnnnnnnnnnnnnnnnnnnnnnnnnnnnnnnnnnnnnnnnnnnnnnnnnnnnnnnnnnnnnnnnnnnnnnnnnnnnnnnnnnnnnnnnnnnnnnnnnnnnnnnnnnnnnnnnnnnnnnnnnnnnnnnnnnnnnnnnnnnnnnnnnnnnnnnnnnnnnnnnnnnnnnnnnnnnnnnnnnnnnnnnnnnnnnnnnnnnnnnnnnnnnnnnnnnnnnnnnnnnnnnnnnnnnnnnnnnnnnnnnnnnnnnnnnnnnnnnnnnnnnnnnnnnnnnnnnnnnnnnnnnnnnnnnnnnnnnnnnnnnnnnnnnnnnnnnnnnnnnnnnnnnnnnnnnnnnnnnnnnnnnnnnnnnnnnnnnnnnnnnnnnnnnnnnnnnnnnnnnnnnnnnnnnnnnnnnnnnnnnnnnnnnnnnnnnnnnnnnnnnnnnnnnnnnnnnnnnnnnnnnnnnnnnnnnnnnnnnnnnnnnnnnnnnnnnnnnnnnnnnnnnnnnnnnnnnnnnnnnnnnnnnnnnnnnnnnnnnnnnnnnnnnnnnnnnnnnnnnnnnnnnnnnnnnnnnnnnnnnnnnnnnnnnnnnnnnnnnnnnnnnnnnnnnnnnnnnnnnnnnnnnnnnnnnnnnnnnnnnnnnnnnnnnnnnnnnnnnnnnnnnnnnnnnnnnnnnnnnnnnnnnnnnnnnnnnnnnnnnnnnnnnnnnnnnnnnnnnnnnnnnnnnnnnnnnnnnnnnnnnnnnnnnnnnnnnnnnnnnnnnnnnnnnnnnnnnnnnnnnnnnnnnnnnnnnnnnnnnnnnnnnnnnnnnnnnnnnnnnnnnnnnnnnnnnnnnnnnnnnnnnnnnnnnnnnnnnnnnnnnnnnnnnnnnnnnnnnnnnnnnnnnnnnnnnnnnnnnnnnnnnnnnnnnnnnnnnnnnnnnnnnnnnnnnnnnnnnnnnnnnnnnnnnnnnnnnnnnnnnnnnnnnnnnnnnnnnnnnnnnnnnnnnnnnnnnnnnnnnnnnnnnnnnnnnnnnnnnnnnnnnnnnnnnnnnnnnnnnnnnnnnnnnnnnnnnnnnnnnnnnnnnnnnnnnnnnnnnnnnnnnnnnnnnnnnnnnnnnnnnnnnnnnnnnnnnnnnnnnnnnnnnnnnnnnnnnnnnnnnnnnnnnnnnnnnnnnnnnnnnnnnnnnnnnnnnnnnnnnnnnnnnnnnnnnnnnnnnnnnnnnnnnnnnnnnnnnnnnnnnnnnnnnnnnnnnnnnnnnnnnnnnnnnnnnnnnnnnnnnnnnnnnnnnnnnnnnnnnnnnnnnnnnnnnnnnnnnnnnnnnnnnnnnnnnnnnnnnnnnnnnnnnnnnnnnnnnnnnnnnnnnnnnnnnnnnnnnnnnnnnnnnnnnnnnnnnnnnnnnnnnnnnnnnnnnnnnnnnnnnnnnnnnnnnnnnnnnnnnnnnnnnnnnnnnnnnnnnnnnnnnnnnnnnnnnnnnnnnnnnnnnnnnnnnnnnnnnnnnnnnnnnnnnnnnnnnnnnnnnnnnnnnnnnnnnnnnnnnnnnnnnnnnnnnnnnnnnnnnnnnnnnnnnnnnnnnnnnnnnnnnnnnnnnnnnnnnnnnnnnnnnnnnnnnnnnnnnnnnnnnnnnnnnnnnnnnnnnnnnnnnnnnnnnnnnnnnnnnnnnnnnnnnnnnnnnnnnnnnnnnnnnnnnnnnnnnnnnnnnnnnnnnnnnnnnnnnnnnnnnnnnnnnnnnnnnnnnnnnnnnnnnnnnnnnnnnnnnnnnnnnnnnnnnnnnnnnnnnnnnnnnnnnnnnnnnnnnnnnnnnnnnnnnnnnnnnnnnnnnnnnnnnnnnnnnnnnnnnnnnnnnnnnnnnnnnnnnnnnnnnnnnnnnnnnnnnnnnnnnnnnnnnnnnnnnnnnnnnnnnnnnnnnnnnnnnnnnnnnnnnnnnnnnnnnnnnnnnnnnnnnnnnnnnnnnnnnnnnnnnnnnnnnnnnnnnnnnnnnnnnnnnnnnnnnnnnnnnnnnnnnnnnnnnnnnnnnnnnnnnnnnnnnnnnnnnnnnnnnnnnnnnnnnnnnnnnnnnnnnnnnnnnnnnnnnnnnnnnnnnnnnnnnnnnnnnnnnnnnnnnnnnnnnnnnnnnnnnnnnnnnnnnnnnnnnnnnnnnnnnnnnnnnnnnnnnnnnnnnnnnnnnnnnnnnnnnnnnnnnnnnnnnnnnnnnnnnnnnnnnnnnnnnnnnnnnnnnnnnnnnnnnnnnnnnnnnnnnnnnnnnnnnnnnnnnnnnnnnnnnnnnnnnnnnnnnnnnnnnnnnnnnnnnnnnnnnnnnnnnnnnnnnnnnnnnnnnnnnnnnnnnnnnnnnnnnnnnnnnnnnnnnnnnnnnnnnnnnnnnnnnnnnnnnnnnnnnnnnnnnnnnnnnnnnnnnnnnnnnnnnnnnnnnnnnnnnnnnnnnnnnnnnnnnnnnnnnnnnnnnnnnnnnnnnnnnnnnnnnnnnnnnnnnnnnnnnnnnnnnnnnnnnnnnnnnnnnnnnnnnnnnnnnnnnnnnnnnnnnnnnnnnnnnnnnnnnnnnnnnnnnnnnnnnnnnnnnnnnnnnnnnnnnnnnnnnnnnnnnnnnnnnnnnnnnnnnnnnnnnnnnnnnnnnnnnnnnnnnnnnnnnnnnnnnnnnnnnnnnnnnnnnnnnnnnnnnnnnnnnnnnnnnnnnnnnnnnnnnnnnnnnnnnnnnnnnnnnnnnnnnnnnnnnnnnnnnnnnnnnnnnnnnnnnnnnnnnnnnnnnnnnnnnnnnnnnnnnnnnnnnnnnnnnnnnnnnnnnnnnnnnnnnnnnnnnnnnnnnnnnnnnnnnnnnnnnnnnnnnnnnnnnnnnnnnnnnnnnnnnnnnnnnnnnnnnnnnnnnnnnnnnnnnnnnnnnnnnnnnnnnnnnnnnnnnnnnnnnnnnnnnnnnnnnnnnnnnnnnnnnnnnnnnnnnnnnnnnnnnnnnnnnnnnnnnnnnnnnnnnnnnnnnnnnnnnnnnnnnnnnnnnnnnnnnnnnnnnnnnnnnnnnnnnnnnnnnnnnnnnnnnnnnnnnnnnnnnnnnnnnnnnnnnnnnnnnnnnnnnnnnnnnnnnnnnnnnnnnnnnnnnnnnnnnnnnnnnnnnnnnnnnnnnnnnnnnnnnnnnnnnnnnnnnnnnnnnnnnnnnnnnnnnnnnnnnnnnnnnnnnnnnnnnnnnnnnnnnnnnnnnnnnnnnnnnnnnnnnnnnnnnnnnnnnnnnnnnnnnnnnnnnnnnnnnnnnnnnnnnnnnnnnnnnnnnnnnnnnnnnnnnnnnnnnnnnnnnnnnnnnnnnnnnnnnnnnnnnnnnnnnnnnnnnnnnnnnnnnnnnnnnnnnnnnnnnnnnnnnnnnnnnnnnnnnnnnnnnnnnnnnnnnnnnnnnnnnnnnnnnnnnnnnnnnnnnnnnnnnnnnnnnnnnnnnnnnnnnnnnnnnnnnnnnnnnnnnnnnnnnnnnnnnnnnnnnnnnnnnnnnnnnnnnnnnnnnnnnnnnnnnnnnnnnnnnnnnnnnnnnnnnnnnnnnnnnnnnnnnnnnnnnnnnnnnnnnnnnnnnnnnnnnnnnnnnnnnnnnnnnnnnnnnnnnnnnnnnnnnnnnnnnnnnnnnnnnnnnnnnnnnnnnnnnnnnnnnnnnnnnnnnnnnnnnnnnnnnnnnnnnnnnnnnnnnnnnnnnnnnnnnnnnnnnnnnnnnnnnnnnnnnnnnnnnnnnnnnnnnnnnnnnnnnnnnnnnnnnnnnnnnnnnnnnnnnnnnnnnnnnnnnnnnnnnnnnnnnnnnnnnnnnnnnnnnnnnnnnnnnnnnnnnnnnnnnnnnnnnnnnnnnnnnnnnnnnnnnnnnnnnnnnnnnnnnnnnnnnnnnnnnnnnnnnnnnnnnnnnnnnnnnnnnnnnnnnnnnnnnnnnnnnnnnnnnnnnnnnnnnnnnnnnnnnnnnnnnnnnnnnnnnnnnnnnnnnnnnnnnnnnnnnnnnnnnnnnnnnnnnnnnnnnnnnnnnnnnnnnnnnnnnnnnnnnnnnnnnnnnnnnnnnnnnnnnnnnnnnnnnnnnnnnnnnnnnnnnnnnnnnnnnnnnnnnnnnnnnnnnnnnnnnnnnnnnnnnnnnnnnnnnnnnnnnnnnnnnnnnnnnnnnnnnnnnnnnnnnnnnnnnnnnnnnnnnnnnnnnnnnnnnnnnnnnnnnnnnnnnnnnnnnnnnnnnnnnnnnnnnnnnnnnnnnnnnnnnnnnnnnnnnnnnnnnnnnnnnnnnnnnnnnnnnnnnnnnnnnnnnnnnnnnnnnnnnnnnnnnnnnnnnnnnnnnnnnnnnnnnnnnnnnnnnnnnnnnnnnnnnnnnnnnnnnnnnnnnnnnnnnnnnnnnnnnnnnnnnnnnnnnnnnnnnnnnnnnnnnnnnnnnnnnnnnnnnnnnnnnnnnnnnnnnnnnnnnnnnnnnnnnnnnnnnnnnnnnnnnnnnnnnnnnnnnnnnnnnnnnnnnnnnnnnnnnnnnnnnnnnnnnnnnnnnnnnnnnnnnnnnnnnnnnnnnnnnnnnnnnnnnnnnnnnnnnnnnnnnnnnnnnnnnnnnnnnnnnnnnnnnnnnnnnnnnnnnnnnnnnnnnnnnnnnnnnnnnnnnnnnnnnnnnnnnnnnnnnnnnnnnnnnnnnnnnnnnnnnnnnnnnnnnnnnnnnnnnnnnnnnnnnnnnnnnnnnnnnnnnnnnnnnnnnnnnnnnnnnnnnnnnnnnnnnnnnnnnnnnnnnnnnnnnnnnnnnnnnnnnnnnnnnnnnnnnnnnnnnnnnnnnnnnnnnnnnnnnnnnnnnnnnnnnnnnnnnnnnnnnnnnnnnnnnnnnnnnnnnnnnnnnnnnnnnnnnnnnnnnnnnnnnnnnnnnnnnnnnnnnnnnnnnnnnnnnnnnnnnnnnnnnnnnnnnnnnnnnnnnnnnnnnnnnnnnnnnnnnnnnnnnnnnnnnnnnnnnnnnnnnnnnnnnnnnnnnnnnnnnnnnnnnnnnnnnnnnnnnnnnnnnnnnnnnnnnnnnnnnnnnnnnnnnnnnnnnnnnnnnnnnnnnnnnnnnnnnnnnnnnnnnnnnnnnnnnnnnnnnnnnnnnnnnnnnnnnnnnnnnnnnnnnnnnnnnnnnnnnnnnnnnnnnnnnnnnnnnnnnnnnnnnnnnnnnnnnnnnnnnnnnnnnnnnnnnnnnnnnnnnnnnnnnnnnnnnnnnnnnnnnnnnnnnnnnnnnnnnnnnnnnnnnnnnnnnnnnnnnnnnnnnnnnnnnnnnnnnnnnnnnnnnnnnnnnnnnnnnnnnnnnnnnnnnnnnnnnnnnnnnnnnnnnnnnnnnnnnnnnnnnnnnnnnnnnnnnnnnnnnnnnnnnnnnnnnnnnnnnnnnnnnnnnnnnnnnnnnnnnnnnnnnnnnnnnnnnnnnnnnnnnnnnnnnnnnnnnnnnnnnnnnnnnnnnnnnnnnnnnnnnnnnnnnnnnnnnnnnnnnnnnnnnnnnnnnnnnnnnnnnnnnnnnnnnnnnnnnnnnnnnnnnnnnnnnnnnnnnnnnnnnnnnnnnnnnnnnnnnnnnnnnnnnnnnnnnnnnnnnnnnnnnnnnnnnnnnnnnnnnnnnnnnnnnnnnnnnnnnnnnnnnnnnnnnnnnnnnnnnnnnnnnnnnnnnnnnnnnnnnnnnnnnnnnnnnnnnnnnnnnnnnnnnnnnnnnnnnnnnnnnnnnnnnnnnnnnnnnnnnnnnnnnnnnnnnnnnnnnnnnnnnnnnnnnnnnnnnnnnnnnnnnnnnnnnnnnnnnnnnnnnnnnnnnnnnnnnnnnnnnnnnnnnnnnnnnnnnnnnnnnnnnnnnnnnnnnnnnnnnnnnnnnnnnnnnnnnnnnnnnnnnnnnnnnnnnnnnnnnnnnnnnnnnnnnnnnnnnnnnnnnnnnnnnnnnnnnnnnnnnnnnnnnnnnnnnnnnnnnnnnnnnnnnnnnnnnnnnnnnnnnnnnnnnnnnnnnnnnnnnnnnnnnnnnnnnnnnnnnnnnnnnnnnnnnnnnnnnnnnnnnnnnnnnnnnnnnnnnnnnnnnnnnnnnnnnnnnnnnnnnnnnnnnnnnnnnnnnnnnnnnnnnnnnnnnnnnnnnnnnnnnnnnnnnnnnnnnnnnnnnnnnnnnnnnnnnnnnnnnnnnnnnnnnnnnnnnnnnnnnnnnnnnnnnnnnnnnnnnnnnnnnnnnnnnnnnnnnnnnnnnnnnnnnnnnnnnnnnnnnnnnnnnnnnnnnnnnnnnnnnnnnnnnnnnnnnnnnnnnnnnnnnnnnnnnnnnnnnnnnnnnnnnnnnnnnnnnnnnnnnnnnnnnnnnnnnnnnnnnnnnnnnnnnnnnnnnnnnnnnnnnnnnnnnnnnnnnnnnnnnnnnnnnnnnnnnnnnnnnnnnnnnnnnnnnnnnnnnnnnnnnnnnnnnnnnnnnnnnnnnnnnnnnnnnnnnnnnnnnnnnnnnnnnnnnnnnnnnnnnnnnnnnnnnnnnnnnnnnnnnnnnnnnnnnnnnnnnnnnnnnnnnnnnnnnnnnnnnnnnnnnnnnnnnnnnnnnnnnnnnnnnnnnnnnnnnnnnnnnnnnnnnnnnnnnnnnnnnnnnnnnnnnnnnnnnnnnnnnnnnnnnnnnnnnnnnnnnnnnnnnnnnnnnnnnnnnnnnnnnnnnnnnnnnnnnnnnnnnnnnnnnnnnnnnnnnnnnnnnnnnnnnnnnnnnnnnnnnnnnnnnnnnnnnnnnnnnnnnnnnnnnnnnnnnnnnnnnnnnnnnnnnnnnnnnnnnnnnnnnnnnnnnnnnnnnnnnnnnnnnnnnnnnnnnnnnnnnnnnnnnnnnnnnnnnnnnnnnnnnnnnnnnnnnnnnnnnnnnnnnnnnnnnnnnnnnnnnnnnnnnnnnnnnnnnnnnnnnnnnnnnnnnnnnnnnnnnnnnnnnnnnnnnnnnnnnnnnnnnnnnnnnnnnnnnnnnnnnnnnnnnnnnnnnnnnnnnnnnnnnnnnnnnnnnnnnnnnnnnnnnnnnnnnnnnnnnnnnnnnnnnnnnnnnnnnnnnnnnnnnnnnnnnnnnnnnnnnnnnnnnnnnnnnnnnnnnnnnnnnnnnnnnnnnnnnnnnnnnnnnnnnnnnnnnnnnnnnnnnnnnnnnnnnnnnnnnnnnnnnnnnnnnnnnnnnnnnnnnnnnnnnnnnnnnnnnnnnnnnnnnnnnnnnnnnnnnnnnnnnnnnnnnnnnnnnnnnnnnnnnnnnnnnnnnnnnnnnnnnnnnnnnnnnnnnnnnnnnnnnnnnnnnnnnnnnnnnnnnnnnnnnnnnnnnnnnnnnnnnnnnnnnnnnnnnnnnnnnnnnnnnnnnnnnnnnnnnnnnnnnnnnnnnnnnnnnnnnnnnnnnnnnnnnnnnnnnnnnnnnnnnnnnnnnnnnnnnnnnnnnnnnnnnnnnnnnnnnnnnnnnnnnnnnnnnnnnnnnnnnnnnnnnnnnnnnnnnnnnnnnnnnnnnnnnnnnnnnnnnnnnnnnnnnnnnnnnnnnnnnnnnnnnnnnnnnnnnnnnnnnnnnnnnnnnnnnnnnnnnnnnnnnnnnnnnnnnnnnnnnnnnnnnnnnnnnnnnnnnnnnnnnnnnnnnnnnnnnnnnnnnnnnnnnnnnnnnnnnnnnnnnnnnnnnnnnnnnnnnnnnnnnnnnnnnnnnnnnnnnnnnnnnnnnnnnnnnnnnnnnnnnnnnnnnnnnnnnnnnnnnnnnnnnnnnnnnnnnnnnnnnnnnnnnnnnnnnnnnnnnnnnnnnnnnnnnnnnnnnnnnnnnnnnnnnnnnnnnnnnnnnnnnnnnnnnnnnnnnnnnnnnnnnnnnnnnnnnnnnnnnnnnnnnnnnnnnnnnnnnnnnnnnnnnnnnnnnnnnnnnnnnnnnnnnnnnnnnnnnnnnnnnnnnnnnnnnnnnnnnnnnnnnnnnnnnnnnnnnnnnnnnnnnnnnnnnnnnnnnnnnnnnnnnnnnnnnnnnnnnnnnnnnnnnnnnnnnnnnnnnnnnnnnnnnnnnnnnnnnnnnnnnnnnnnnnnnnnnnnnnnnnnnnnnnnnnnnnnnnnnnnnnnnnnnnnnnnnnnnnnnnnnnnnnnnnnnnnnnnnnnnnnnnnnnnnnnnnnnnnnnnnnnnnnnnnnnnnnnnnnnnnnnnnnnnnnnnnnnnnnnnnnnnnnnnnnnnnnnnnnnnnnnnnnnnnnnnnnnnnnnnnnnnnnnnnnnnnnnnnnnnnnnnnnnnnnnnnnnnnnnnnnnnnnnnnnnnnnnnnnnnnnnnnnnnnnnnnnnnnnnnnnnnnnnnnnnnnnnnnnnnnnnnnnnnnnnnnnnnnnnnnnnnnnnnnnnnnnnnnnnnnnnnnnnnnnnnnnnnnnnnnnnnnnnnnnnnnnnnnnnnnnnnnnnnnnnnnnnnnnnnnnnnnnnnnnnnnnnnnnnnnnnnnnnnnnnnnnnnnnnnnnnnnnnnnnnnnnnnnnnnnnnnnnnnnnnnnnnnnnnnnnnnnnnnnnnnnnnnnnnnnnnnnnnnnnnnnnnnnnnnnnnnnnnnnnnnnnnnnnnnnnnnnnnnnnnnnnnnnnnnnnnnnnnnnnnnnnnnnnnnnnnnnnnnnnnnnnnnnnnnnnnnnnnnnnnnnnnnnnnnnnnnnnnnnnnnnnnnnnnnnnnnnnnnnnnnnnnnnnnnnnnnnnnnnnnnnnnnnnnnnnnnnnnnnnnnnnnnnnnnnnnnnnnnnnnnnnnnnnnnnnnnnnnnnnnnnnnnnnnnnnnnnnnnnnnnnnnnnnnnnnnnnnnnnnnnnnnnnnnnnnnnnnnnnnnnnnnnnnnnnnnnnnnnnnnnnnnnnnnnnnnnnnnnnnnnnnnnnnnnnnnnnnnnnnnnnnnnnnnnnnnnnnnnnnnnnnnnnnnnnnnnnnnnnnnnnnnnnnnnnnnnnnnnnnnnnnnnnnnnnnnnnnnnnnnnnnnnnnnnnnnnnnnnnnnnnnnnnnnnnnnnnnnnnnnnnnnnnnnnnnnnnnnnnnnnnnnnnnnnnnnnnnnnnnnnnnnnnnnnnnnnnnnnnnnnnnnnnnnnnnnnnnnnnnnnnnnnnnnnnnnnnnnnnnnnnnnnnnnnnnnnnnnnnnnnnnnnnnnnnnnnnnnnnnnnnnnnnnnnnnnnnnnnnnnnnnnnnnnnnnnnnnnnnnnnnnnnnnnnnnnnnnnnnnnnnnnnnnnnnnnnnnnnnnnnnnnnnnnnnnnnnnnnnnnnnnnnnnnnnnnnnnnnnnnnnnnnnnnnnnnnnnnnnnnnnnnnnnnnnnnnnnnnnnnnnnnnnnnnnnnnnnnnnnnnnnnnnnnnnnnnnnnnnnnnnnnnnnnnnnnnnnnnnnnnnnnnnnnnnnnnnnnnnnnnnnnnnnnnnnnnnnnnnnnnnnnnnnnnnnnnnnnnnnnnnnnnnnnnnnnnnnnnnnnnnnnnnnnnnnnnnnnnnnnnnnnnnnnnnnnnnnnnnnnnnnnnnnnnnnnnnnnnnnnnnnnnnnnnnnnnnnnnnnnnnnnnnnnnnnnnnnnnnnnnnnnnnnnnnnnnnnnnnnnnnnnnnnnnnnnnnnnnnnnnnnnnnnnnnnnnnnnnnnnnnnnnnnnnnnnnnnnnnnnnnnnnnnnnnnnnnnnnnnnnnnnnnnnnnnnnnnnnnnnnnnnnnnnnnnnnnnnnnnnnnnnnnnnnnnnnnnnnnnnnnnnnnnnnnnnnnnnnnnnnnnnnnnnnnnnnnnnnnnnnnnnnnnnnnnnnnnnnnnnnnnnnnnnnnnnnnnnnnnnnnnnnnnnnnnnnnnnnnnnnnnnnnnnnnnnnnnnnnnnnnnnnnnnnnnnnnnnnnnnnnnnnnnnnnnnnnnnnnnnnnnnnnnnnnnnnnnnnnnnnnnnnnnnnnnnnnnnnnnnnnnnnnnnnnnnnnnnnnnnnnnnnnnnnnnnnnnnnnnnnnnnnnnnnnnnnnnnnnnnnnnnnnnnnnnnnnnnnnnnnnnnnnnnnnnnnnnnnnnnnnnnnnnnnnnnnnnnnnnnnnnnnnnnnnnnnnnnnnnnnnnnnnnnnnnnnnnnnnnnnnnnnnnnnnnnnnnnnnnnnnnnnnnnnnnnnnnnnnnnnnnnnnnnnnnnnnnnnnnnnnnnnnnnnnnnnnnnnnnnnnnnnnnnnnnnnnnnnnnnnnnnnnnnnnnnnnnnnnnnnnnnnnnnnnnnnnnnnnnnnnnnnnnnnnnnnnnnnnnnnnnnnnnnnnnnnnnnnnnnnnnnnnnnnnnnnnnnnnnnnnnnnnnnnnnnnnnnnnnnnnnnnnnnnnnnnnnnnnnnnnnnnnnnnnnnnnnnnnnnnnnnnnnnnnnnnnnnnnnnnnnnnnnnnnnnnnnnnnnnnnnnnnnnnnnnnnnnnnnnnnnnnnnnnnnnnnnnnnnnnnnnnnnnnnnnnnnnnnnnnnnnnnnnnnnnnnnnnnnnnnnnnnnnnnnnnnnnnnnnnnnnnnnnnnnnnnnnnnnnnnnnnnnnnnnnnnnnnnnnnnnnnnnnnnnnnnnnnnnnnnnnnnnnnnnnnnnnnnnnnnnnnnnnnnnnnnnnnnnnnnnnnnnnnnnnnnnnnnnnnnnnnnnnnnnnnnnnnnnnnnnnnnnnnnnnnnnnnnnnnnnnnnnnnnnnnnnnnnnnnnnnnnnnnnnnnnnnnnnnnnnnnnnnnnnnnnnnnnnnnnnnnnnnnnnnnnnnnnnnnnnnnnnnnnnnnnnnnnnnnnnnnnnnnnnnnnnnnnnnnnnnnnnnnnnnnnnnnnnnnnnnnnnnnnnnnnnnnnnnnnnnnnnnnnnnnnnnnnnnnnnnnnnnnnnnnnnnnnnnnnnnnnnnnnnnnnnnnnnnnnnnnnnnnnnnnnnnnnnnnnnnnnnnnnnnnnnnnnnnnnnnnnnnnnnnnnnnnnnnnnnnnnnnnnnnnnnnnnnnnnnnnnnnnnnnnnnnnnnnnnnnnnnnnnnnnnnnnnnnnnnnnnnnnnnnnnnnnnnnnnnnnnnnnnnnnnnnnnnnnnnnnnnnnnnnnnnnnnnnnnnnnnnnnnnnnnnnnnnnnnnnnnnnnnnnnnnnnnnnnnnnnnnnnnnnnnnnnnnnnnnnnnnnnnnnnnnnnnnnnnnnnnnnnnnnnnnnnnnnnnnnnnnnnnnnnnnnnnnnnnnnnnnnnnnnnnnnnnnnnnnnnnnnnnnnnnnnnnnnnnnnnnnnnnnnnnnnnnnnnnnnnnnnnnnnnnnnnnnnnnnnnnnnnnnnnnnnnnnnnnnnnnnnnnnnnnnnnnnnnnnnnnnnnnnnnnnnnnnnnnnnnnnnnnnnnnnnnnnnnnnnnnnnnnnnnnnnnnnnnnnnnnnnnnnnnnnnnnnnnnnnnnnnnnnnnnnnnnnnnnnnnnnnnnnnnnnnnnnnnnnnnnnnnnnnnnnnnnnnnnnnnnnnnnnnnnnnnnnnnnnnnnnnnnnnnnnnnnnnnnnnnnnnnnnnnnnnnnnnnnnnnnnnnnnnnnnnnnnnnnnnnnnnnnnnnnnnnnnnnnnnnnnnnnnnnnnnnnnnnnnnnnnnnnnnnnnnnnnnnnnnnnnnnnnnnnnnnnnnnnnnnnnnnnnnnnnnnnnnnnnnnnnnnnnnnnnnnnnnnnnnnnnnnnnnnnnnnnnnnnnnnnnnnnnnnnnnnnnnnnnnnnnnnnnnnnnnnnnnnnnnnnnnnnnnnnnnnnnnnnnnnnnnnnnnnnnnnnnnnnnnnnnnnnnnnnnnnnnnnnnnnnnnnnnnnnnnnnnnnnnnnnnnnnnnnnnnnnnnnnnnnnnnnnnnnnnnnnnnnnnnnnnnnnnnnnnnnnnnnnnnnnnnnnnnnnnnnnnnnnnnnnnnnnnnnnnnnnnnnnnnnnnnnnnnnnnnnnnnnnnnnnnnnnnnnnnnnnnnnnnnnnnnnnnnnnnnnnnnnnnnnnnnnnnnnnnnnnnnnnnnnnnnnnnnnnnnnnnnnnnnnnnnnnnnnnnnnnnnnnnnnnnnnnnnnnnnnnnnnnnnnnnnnnnnnnnnnnnnnnnnnnnnnnnnnnnnnnnnnnnnnnnnnnnnnnnnnnnnnnnnnnnnnnnnnnnnnnnnnnnnnnnnnnnnnnnnnnnnnnnnnnnnnnnnnnnnnnnnnnnnnnnnnnnnnnnnnnnnnnnnnnnnnnnnnnnnnnnnnnnnnnnnnnnnnnnnnnnnnnnnnnnnnnnnnnnnnnnnnnnnnnnnnnnnnnnnnnnnnnnnnnnnnnnnnnnnnnnnnnnnnnnnnnnnnnnnnnnnnnnnnnnnnnnnnnnnnnnnnnnnnnnnnnnnnnnnnnnnnnnnnnnnnnnnnnnnnnnnnnnnnnnnnnnnnnnnnnnnnnnnnnnnnnnnnnnnnnnnnnnnnnnnnnnnnnnnnnnnnnnnnnnnnnnnnnnnnnnnnnnnnnnnnnnnnnnnnnnnnnnnnnnnnnnnnnnnnnnnnnnnnnnnnnnnnnnnnnnnnnnnnnnnnnnnnnnnnnnnnnnnnnnnnnnnnnnnnnnnnnnnnnnnnnnnnnnnnnnnnnnnnnnnnnnnnnnnnnnnnnnnnnnnnnnnnnnnnnnnnnnnnnnnnnnnnnnnnnnnnnnnnnnnnnnnnnnnnnnnnnnnnnnnnnnnnnnnnnnnnnnnnnnnnnnnnnnnnnnnnnnnnnnnnnnnnnnnnnnnnnnnnnnnnnnnnnnnnnnnnnnnnnnnnnnnnnnnnnnnnnnnnnnnnnnnnnnnnnnnnnnnnnnnnnnnnnnnnnnnnnnnnnnnnnnnnnnnnnnnnnnnnnnnnnnnnnnnnnnnnnnnnnnnnnnnnnnnnnnnnnnnnnnnnnnnnnnnnnnnnnnnnnnnnnnnnnnnnnnnnnnnnnnnnnnnnnnnnnnnnnnnnnnnnnnnnnnnnnnnnnnnnnnnnnnnnnnnnnnnnnnnnnnnnnnnnnnnnnnnnnnnnnnnnnnnnnnnnnnnnnnnnnnnnnnnnnnnnnnnnnnnnnnnnnnnnnnnnnnnnnnnnnnnnnnnnnnnnnnnnnnnnnnnnnnnnnnnnnnnnnnnnnnnnnnnnnnnnnnnnnnnnnnnnnnnnnnnnnnnnnnnnnnnnnnnnnnnnnnnnnnnnnnnnnnnnnnnnnnnnnnnnnnnnnnnnnnnnnnnnnnnnnnnnnnnnnnnnnnnnnnnnnnnnnnnnnnnnnnnnnnnnnnnnnnnnnnnnnnnnnnnnnnnnnnnnnnnnnnnnnnnnnnnnnnnnnnnnnnnnnnnnnnnnnnnnnnnnnnnnnnnnnnnnnnnnnnnnnnnnnnnnnnnnnnnnnnnnnnnnnnnnnnnnnnnnnnnnnnnnnnnnnnnnnnnnnnnnnnnnnnnnnnnnnnnnnnnnnnnnnnnnnnnnnnnnnnnnnnnnnnnnnnnnnnnnnnnnnnnnnnnnnnnnnnnnnnnnnnnnnnnnnnnnnnnnnnnnnnnnnnnnnnnnnnnnnnnnnnnnnnnnnnnnnnnnnnnnnnnnnnnnnnnnnnnnnnnnnnnnnnnnnnnnnnnnnnnnnnnnnnnnnnnnnnnnnnnnnnnnnnnnnnnnnnnnnnnnnnnnnnnnnnnnnnnnnnnnnnnnnnnnnnnnnnnnnnnnnnnnnnnnnnnnnnnnnnnnnnnnnnnnnnnnnnnnnnnnnnnnnnnnnnnnnnnnnnnnnnnnnnnnnnnnnnnnnnnnnnnnnnnnnnnnnnnnnnnnnnnnnnnnnnnnnnnnnnnnnnnnnnnnnnnnnnnnnnnnnnnnnnnnnnnnnnnnnnnnnnnnnnnnnnnnnnnnnnnnnnnnnnnnnnnnnnnnnnnnnnnnnnnnnnnnnnnnnnnnnnnnnnnnnnnnnnnnnnnnnnnnnnnnnnnnnnnnnnnnnnnnnnnnnnnnnnnnnnnnnnnnnnnnnnnnnnnnnnnnnnnnnnnnnnnnnnnnnnnnnnnnnnnnnnnnnnnnnnnnnnnnnnnnnnnnnnnnnnnnnnnnnnnnnnnnnnnnnnnnnnnnnnnnnnnnnnnnnnnnnnnnnnnnnnnnnnnnnnnnnnnnnnnnnnnnnnnnnnnnnnnnnnnnnnnnnnnnnnnnnnnnnnnnnnnnnnnnnnnnnnnnnnnnnnnnnnnnnnnnnnnnnnnnnnnnnnnnnnnnnnnnnnnnnnnnnnnnnnnnnnnnnnnnnnnnnnnnnnnnnnnnnnnnnnnnnnnnnnnnnnnnnnnnnnnnnnnnnnnnnnnnnnnnnnnnnnnnnnnnnnnnnnnnnnnnnnnnnnnnnnnnnnnnnnnnnnnnnnnnnnnnnnnnnnnnnnnnnnnnnnnnnnnnnnnnnnnnnnnnnnnnnnnnnnnnnnnnnnnnnnnnnnnnnnnnnnnnnnnnnnnnnnnnnnnnnnnnnnnnnnnnnnnnnnnnnnnnnnnnnnnnnnnnnnnnnnnnnnnnnnnnnnnnnnnnnnnnnnnnnnnnnnnnnnnnnnnnnnnnnnnnnnnnnnnnnnnnnnnnnnnnnnnnnnnnnnnnnnnnnnnnnnnnnnnnnnnnnnnnnnnnnnnnnnnnnnnnnnnnnnnnnnnnnnnnnnnnnnnnnnnnnnnnnnnnnnnnnnnnnnnnnnnnnnnnnnnnnnnnnnnnnnnnnnnnnnnnnnnnnnnnnnnnnnnnnnnnnnnnnnnnnnnnnnnnnnnnnnnnnnnnnnnnnnnnnnnnnnnnnnnnnnnnnnnnnnnnnnnnnnnnnnnnnnnnnnnnnnnnnnnnnnnnnnnnnnnnnnnnnnnnnnnnnnnnnnnnnnnnnnnnnnnnnnnnnnnnnnnnnnnnnnnnnnnnnnnnnnnnnnnnnnnnnnnnnnnnnnnnnnnnnnnnnnnnnnnnnnnnnnnnnnnnnnnnnnnnnnnnnnnnnnnnnnnnnnnnnnnnnnnnnnnnnnnnnnnnnnnnnnnnnnnnnnnnnnnnnnnnnnnnnnnnnnnnnnnnnnnnnnnnnnnnnnnnnnnnnnnnnnnnnnnnnnnnnnnnnnnnnnnnnnnnnnnnnnnnnnnnnnnnnnnnnnnnnnnnnnnnnnnnnnnnnnnnnnnnnnnnnnnnnnnnnnnnnnnnnnnnnnnnnnnnnnnnnnnnnnnnnnnnnnnnnnnnnnnnnnnnnnnnnnnnnnnnnnnnnnnnnnnnnnnnnnnnnnnnnnnnnnnnnnnnnnnnnnnnnnnnnnnnnnnnnnnnnnnnnnnnnnnnnnnnnnnnnnnnnnnnnnnnnnnnnnnnnnnnnnnnnnnnnnnnnnnnnnnnnnnnnnnnnnnnnnnnnnnnnnnnnnnnnnnnnnnnnnnnnnnnnnnnnnnnnnnnnnnnnnnnnnnnnnnnnnnnnnnnnnnnnnnnnnnnnnnnnnnnnnnnnnnnnnnnnnnnnnnnnnnnnnnnnnnnnnnnnnnnnnnnnnnnnnnnnnnnnnnnnnnnnnnnnnnnnnnnnnnnnnnnnnnnnnnnnnnnnnnnnnnnnnnnnnnnnnnnnnnnnnnnnnnnnnnnnnnnnnnnnnnnnnnnnnnnnnnnnnnnnnnnnnnnnnnnnnnnnnnnnnnnnnnnnnnnnnnnnnnnnnnnnnnnnnnnnnnnnnnnnnnnnnnnnnnnnnnnnnnnnnnnnnnnnnnnnnnnnnnnnnnnnnnnnnnnnnnnnnnnnnnnnnnnnnnnnnnnnnnnnnnnnnnnnnnnnnnnnnnnnnnnnnnnnnnnnnnnnnnnnnnnnnnnnnnnnnnnnnnnnnnnnnnnnnnnnnnnnnnnnnnnnnnnnnnnnnnnnnnnnnnnnnnnnnnnnnnnnnnnnnnnnnnnnnnnnnnnnnnnnnnnnnnnnnnnnnnnnnnnnnnnnnnnnnnnnnnnnnnnnnnnnnnnnnnnnnnnnnnnnnnnnnnnnnnnnnnnnnnnnnnnnnnnnnnnnnnnnnnnnnnnnnnnnnnnnnnnnnnnnnnnnnnnnnnnnnnnnnnnnnnnnnnnnnnnnnnnnnnnnnnnnnnnnnnnnnnnnnnnnnnnnnnnnnnnnnnnnnnnnnnnnnnnnnnnnnnnnnnnnnnnnnnnnnnnnnnnnnnnnnnnnnnnnnnnnnnnnnnnnnnnnnnnnnnnnnnnnnnnnnnnnnnnnnnnnnnnnnnnnnnnnnnnnnnnnnnnnnnnnnnnnnnnnnnnnnnnnnnnnnnnnnnnnnnnnnnnnnnnnnnnnnnnnnnnnnnnnnnnnnnnnnnnnnnnnnnnnnnnnnnnnnnnnnnnnnnnnnnnnnnnnnnnnnnnnnnnnnnnnnnnnnnnnnnnnnnnnnnnnnnnnnnnnnnnnnnnnnnnnnnnnnnnnnnnnnnnnnnnnnnnnnnnnnnnnnnnnnnnnnnnnnnnnnnnnnnnnnnnnnnnnnnnnnnnnnnnnnnnnnnnnnnnnnnnnnnnnnnnnnnnnnnnnnnnnnnnnnnnnnnnnnnnnnnnnnnnnnnnnnnnnnnnnnnnnnnnnnnnnnnnnnnnnnnnnnnnnnnnnnnnnnnnnnnnnnnnnnnnnnnnnnnnnnnnnnnnnnnnnnnnnnnnnnnnnnnnnnnnnnnnnnnnnnnnnnnnnnnnnnnnnnnnnnnnnnnnnnnnnnnnnnnnnnnnnnnnnnnnnnnnnnnnnnnnnnnnnnnnnnnnnnnnnnnnnnnnnnnnnnnnnnnnnnnnnnnnnnnnnnnnnnnnnnnnnnnnnnnnnnnnnnnnnnnnnnnnnnnnnnnnnnnnnnnnnnnnnnnnnnnnnnnnnnnnnnnnnnnnnnnnnnnnnnnnnnnnnnnnnnnnnnnnnnnnnnnnnnnnnnnnnnnnnnnnnnnnnnnnnnnnnnnnnnnnnnnnnnnnnnnnnnnnnnnnnnnnnnnnnnnnnnnnnnnnnnnnnnnnnnnnnnnnnnnnnnnnnnnnnnnnnnnnnnnnnnnnnnnnnnnnnnnnnnnnnnnnnnnnnnnnnnnnnnnnnnnnnnnnnnnnnnnnnnnnnnnnnnnnnnnnnnnnnnnnnnnnnnnnnnnnnnnnnnnnnnnnnnnnnnnnnnnnnnnnnnnnnnnnnnnnnnnnnnnnnnnnnnnnnnnnnnnnnnnnnnnnnnnnnnnnnnnnnnnnnnnnnnnnnnnnnnnnnnnnnnnnnnnnnnnnnnnnnnnnnnnnnnnnnnnnnnnnnnnnnnnnnnnnnnnnnnnnnnnnnnnnnnnnnnnnnnnnnnnnnnnnnnnnnnnnnnnnnnnnnnnnnnnnnnnnnnnnnnnnnnnnnnnnnnnnnnnnnnnnnnnnnnnnnnnnnnnnnnnnnnnnnnnnnnnnnnnnnnnnnnnnnnnnnnnnnnnnnnnnnnnnnnnnnnnnnnnnnnnnnnnnnnnnnnnnnnnnnnnnnnnnnnnnnnnnnnnnnnnnnnnnnnnnnnnnnnnnnnnnnnnnnnnnnnnnnnnnnnnnnnnnnnnnnnnnnnnnnnnnnnnnnnnnnnnnnnnnnnnnnnnnnnnnnnnnnnnnnnnnnnnnnnnnnnnnnnnnnnnnnnnnnnnnnnnnnnnnnnnnnnnnnnnnnnnnnnnnnnnnnnnnnnnnnnnnnnnnnnnnnnnnnnnnnnnnnnnnnnnnnnnnnnnnnnnnnnnnnnnnnnnnnnnnnnnnnnnnnnnnnnnnnnnnnnnnnnnnnnnnnnnnnnnnnnnnnnnnnnnnnnnnnnnnnnnnnnnnnnnnnnnnnnnnnnnnnnnnnnnnnnnnnnnnnnnnnnnnnnnnnnnnnnnnnnnnnnnnnnnnnnnnnnnnnnnnnnnnnnnnnnnnnnnnnnnnnnnnnnnnnnnnnnnnnnnnnnnnnnnnnnnnnnnnnnnnnnnnnnnnnnnnnnnnnnnnnnnnnnnnnnnnnnnnnnnnnnnnnnnnnnnnnnnnnnnnnnnnnnnnnnnnnnnnnnnnnnnnnnnnnnnnnnnnnnnnnnnnnnnnnnnnnnnnnnnnnnnnnnnnnnnnnnnnnnnnnnnnnnnnnnnnnnnnnnnnnnnnnnnnnnnnnnnnnnnnnnnnnnnnnnnnnnnnnnnnnnnnnnnnnnnnnnnnnnnnnnnnnnnnnnnnnnnnnnnnnnnnnnnnnnnnnnnnnnnnnnnnnnnnnnnnnnnnnnnnnnnnnnnnnnnnnnnnnnnnnnnnnnnnnnnnnnnnnnnnnnnnnnnnnnnnnnnnnnnnnnnnnnnnnnnnnnnnnnnnnnnnnnnnnnnnnnnnnnnnnnnnnnnnnnnnnnnnnnnnnnnnnnnnnnnnnnnnnnnnnnnnnnnnnnnnnnnnnnnnnnnnnnnnnnnnnnnnnnnnnnnnnnnnnnnnnnnnnnnnnnnnnnnnnnnnnnnnnnnnnnnnnnnnnnnnnnnnnnnnnnnnnnnnnnnnnnnnnnnnnnnnnnnnnnnnnnnnnnnnnnnnnnnnnnnnnnnnnnnnnnnnnnnnnnnnnnnnnnnnnnnnnnnnnnnnnnnnnnnnnnnnnnnnnnnnnnnnnnnnnnnnnnnnnnnnnnnnnnnnnnnnnnnnnnnnnnnnnnnnnnnnnnnnnnnnnnnnnnnnnnnnnnnnnnnnnnnnnnnnnnnnnnnnnnnnnnnnnnnnnnnnnnnnnnnnnnnnnnnnnnnnnnnnnnnnnnnnnnnnnnnnnnnnnnnnnnnnnnnnnnnnnnnnnnnnnnnnnnnnnnnnnnnnnnnnnnnnnnnnnnnnnnnnnnnnnnnnnnnnnnnnnnnnnnnnnnnnnnnnnnnnnnnnnnnnnnnnnnnnnnnnnnnnnnnnnnnnnnnnnnnnnnnnnnnnnnnnnnnnnnnnnnnnnnnnnnnnnnnnnnnnnnnnnnnnnnnnnnnnnnnnnnnnnnnnnnnnnnnnnnnnnnnnnnnnnnnnnnnnnnnnnnnnnnnnnnnnnnnnnnnnnnnnnnnnnnnnnnnnnnnnnnnnnnnnnnnnnnnnnnnnnnnnnnnnnnnnnnnnnnnnnnnnnnnnnnnnnnnnnnnnnnnnnnnnnnnnnnnnnnnnnnnnnnnnnnnnnnnnnnnnnnnnnnnnnnnnnnnnnnnnnnnnnnnnnnnnnnnnnnnnnnnnnnnnnnnnnnnnnnnnnnnnnnnnnnnnnnnnnnnnnnnnnnnnnnnnnnnnnnnnnnnnnnnnnnnnnnnnnnnnnnnnnnnnnnnnnnnnnnnnnnnnnnnnnnnnnnnnnnnnnnnnnnnnnnnnnnnnnnnnnnnnnnnnnnnnnnnnnnnnnnnnnnnnnnnnnnnnnnnnnnnnnnnnnnnnnnnnnnnnnnnnnnnnnnnnnnnnnnnnnnnnnnnnnnnnnnnnnnnnnnnnnnnnnnnnnnnnnnnnnnnnnnnnnnnnnnnnnnnnnnnnnnnnnnnnnnnnnnnnnnnnnnnnnnnnnnnnnnnnnnnnnnnnnnnnnnnnnnnnnnnnnnnnnnnnnnnnnnnnnnnnnnnnnnnnnnnnnnnnnnnnnnnnnnnnnnnnnnnnnnnnnnnnnnnnnnnnnnnnnnnnnnnnnnnnnnnnnnnnnnnnnnnnnnnnnnnnnnnnnnnnnnnnnnnnnnnnnnnnnnnnnnnnnnnnnnnnnnnnnnnnnnnnnnnnnnnnnnnnnnnnnnnnnnnnnnnnnnnnnnnnnnnnnnnnnnnnnnnnnnnnnnnnnnnnnnnnnnnnnnnnnnnnnnnnnnnnnnnnnnnnnnnnnnnnnnnnnnnnnnnnnnnnnnnnnnnnnnnnnnnnnnnnnnnnnnnnnnnnnnnnnnnnnnnnnnnnnnnnnnnnnnnnnnnnnnnnnnnnnnnnnnnnnnnnnnnnnnnnnnnnnnnnnnnnnnnnnnnnnnnnnnnnnnnnnnnnnnnnnnnnnnnnnnnnnnnnnnnnnnnnnnnnnnnnnnnnnnnnnnnnnnnnnnnnnnnnnnnnnnnnnnnnnnnnnnnnnnnnnnnnnnnnnnnnnnnnnnnnnnnnnnnnnnnnnnnnnnnnnnnnnnnnnnnnnnnnnnnnnnnnnnnnnnnnnnnnnnnnnnnnnnnnnnnnnnnnnnnnnnnnnnnnnnnnnnnnnnnnnnnnnnnnnnnnnnnnnnnnnnnnnnnnnnnnnnnnnnnnnnnnnnnnnnnnnnnnnnnnnnnnnnnnnnnnnnnnnnnnnnnnnnnnnnnnnnnnnnnnnnnnnnnnnnnnnnnnnnnnnnnnnnnnnnnnnnnnnnnnnnnnnnnnnnnnnnnnnnnnnnnnnnnnnnnnnnnnnnnnnnnnnnnnnnnnnnnnnnnnnnnnnnnnnnnnnnnnnnnnnnnnnnnnnnnnnnnnnnnnnnnnnnnnnnnnnnnnnnnnnnnnnnnnnnnnnnnnnnnnnnnnnnnnnnnnnnnnnnnnnnnnnnnnnnnnnnnnnnnnnnnnnnnnnnnnnnnnnnnnnnnnnnnnnnnnnnnnnnnnnnnnnnnnnnnnnnnnnnnnnnnnnnnnnnnnnnnnnnnnnnnnnnnnnnnnnnnnnnnnnnnnnnnnnnnnnnnnnnnnnnnnnnnnnnnnnnnnnnnnnnnnnnnnnnnnnnnnnnnnnnnnnnnnnnnnnnnnnnnnnnnnnnnnnnnnnnnnnnnnnnnnnnnnnnnnnnnnnnnnnnnnnnnnnnnnnnnnnnnnnnnnnnnnnnnnnnnnnnnnnnnnnnnnnnnnnnnnnnnnnnnnnnnnnnnnnnnnnnnnnnnnnnnnnnnnnnnnnnnnnnnnnnnnnnnnnnnnnnnnnnnnnnnnnnnnnnnnnnnnnnnnnnnnnnnnnnnnnnnnnnnnnnnnnnnnnnnnnnnnnnnnnnnnnnnnnnnnnnnnnnnnnnnnnnnnnnnnnnnnnnnnnnnnnnnnnnnnnnnnnnnnnnnnnnnnnnnnnnnnnnnnnnnnnnnnnnnnnnnnnnnnnnnnnnnnnnnnnnnnnnnnnnnnnnnnnnnnnnnnnnnnnnnnnnnnnnnnnnnnnnnnnnnnnnnnnnnnnnnnnnnnnnnnnnnnnnnnnnnnnnnnnnnnnnnnnnnnnnnnnnnnnnnnnnnnnnnnnnnnnnnnnnnnnnnnnnnnnnnnnnnnnnnnnnnnnnnnnnnnnnnnnnnnnnnnnnnnnnnnnnnnnnnnnnnnnnnnnnnnnnnnnnnnnnnnnnnnnnnnnnnnnnnnnnnnnnnnnnnnnnnnnnnnnnnnnnnnnnnnnnnnnnnnnnnnnnnnnnnnnnnnnnnnnnnnnnnnnnnnnnnnnnnnnnnnnnnnnnnnnnnnnnnnnnnnnnnnnnnnnnnnnnnnnnnnnnnnnnnnnnnnnnnnnnnnnnnnnnnnnnnnnnnnnnnnnnnnnnnnnnnnnnnnnnnnnnnnnnnnnnnnnnnnnnnnnnnnnnnnnnnnnnnnnnnnnnnnnnnnnnnnnnnnnnnnnnnnnnnnnnnnnnnnnnnnnnnnnnnnnnnnnnnnnnnnnnnnnnnnnnnnnnnnnnnnnnnnnnnnnnnnnnnnnnnnnnnnnnnnnnnnnnnnnnnnnnnnnnnnnnnnnnnnnnnnnnnnnnnnnnnnnnnnnnnnnnnnnnnnnnnnnnnnnnnnnnnnnnnnnnnnnnnnnnnnnnnnnnnnnnnnnnnnnnnnnnnnnnnnnnnnnnnnnnnnnnnnnnnnnnnnnnnnnnnnnnnnnnnnnnnnnnnnnnnnnnnnnnnnnnnnnnnnnnnnnnnnnnnnnnnnnnnnnnnnnnnnnnnnnnnnnnnnnnnnnnnnnnnnnnnnnnnnnnnnnnnnnnnnnnnnnnnnnnnnnnnnnnnnnnnnnnnnnnnnnnnnnnnnnnnnnnnnnnnnnnnnnnnnnnnnnnnnnnnnnnnnnnnnnnnnnnnnnnnnnnnnnnnnnnnnnnnnnnnnnnnnnnnnnnnnnnnnnnnnnnnnnnnnnnnnnnnnnnnnnnnnnnnnnnnnnnnnnnnnnnnnnnnnnnnnnnnnnnnnnnnnnnnnnnnnnnnnnnnnnnnnnnnnnnnnnnnnnnnnnnnnnnnnnnnnnnnnnnnnnnnnnnnnnnnnnnnnnnnnnnnnnnnnnnnnnnnnnnnnnnnnnnnnnnnnnnnnnnnnnnnnnnnnnnnnnnnnnnnnnnnnnnnnnnnnnnnnnnnnnnnnnnnnnnnnnnnnnnnnnnnnnnnnnnnnnnnnnnnnnnnnnnnnnnnnnnnnnnnnnnnnnnnnnnnnnnnnnnnnnnnnnnnnnnnnnnnnnnnnnnnnnnnnnnnnnnnnnnnnnnnnnnnnnnnnnnnnnnnnnnnnnnnnnnnnnnnnnnnnnnnnnnnnnnnnnnnnnnnnnnnnnnnnnnnnnnnnnnnnnnnnnnnnnnnnnnnnnnnnnnnnnnnnnnnnnnnnnnnnnnnnnnnnnnnnnnnnnnnnnnnnnnnnnnnnnnnnnnnnnnnnnnnnnnnnnnnnnnnnnnnnnnnnnnnnnnnnnnnnnnnnnnnnnnnnnnnnnnnnnnnnnnnnnnnnnnnnnnnnnnnnnnnnnnnnnnnnnnnnnnnnnnnnnnnnnnnnnnnnnnnnnnnnnnnnnnnnnnnnnnnnnnnnnnnnnnnnnnnnnnnnnnnnnnnnnnnnnnnnnnnnnnnnnnnnnnnnnnnnnnnnnnnnnnnnnnnnnnnnnnnnnnnnnnnnnnnnnnnnnnnnnnnnnnnnnnnnnnnnnnnnnnnnnnnnnnnnnnnnnnnnnnnnnnnnnnnnnnnnnnnnnnnnnnnnnnnnnnnnnnnnnnnnnnnnnnnnnnnnnnnnnnnnnnnnnnnnnnnnnnnnnnnnnnnnnnnnnnnnnnnnnnnnnnnnnnnnnnnnnnnnnnnnnnnnnnnnnnnnnnnnnnnnnnnnnnnnnnnnnnnnnnnnnnnnnnnnnnnnnnnnnnnnnnnnnnnnnnnnnnnnnnnnnnnnnnnnnnnnnnnnnnnnnnnnnnnnnnnnnnnnnnnnnnnnnnnnnnnnnnnnnnnnnnnnnnnnnnnnnnnnnnnnnnnnnnnnnnnnnnnnnnnnnnnnnnnnnnnnnnnnnnnnnnnnnnnnnnnnnnnnnnnnnnnnnnnnnnnnnnnnnnnnnnnnnnnnnnnnnnnnnnnnnnnnnnnnnnnnnnnnnnnnnnnnnnnnnnnnnnnnnnnnnnnnnnnnnnnnnnnnnnnnnnnnnnnnnnnnnnnnnnnnnnnnnnnnnnnnnnnnnnnnnnnnnnnnnnnnnnnnnnnnnnnnnnnnnnnnnnnnnnnnnnnnnnnnnnnnnnnnnnnnnnnnnnnnnnnnnnnnnnnnnnnnnnnnnnnnnnnnnnnnnnnnnnnnnnnnnnnnnnnnnnnnnnnnnnnnnnnnnnnnnnnnnnnnnnnnnnnnnnnnnnnnnnnnnnnnnnnnnnnnnnnnnnnnnnnnnnnnnnnnnnnnnnnnnnnnnnnnnnnnnnnnnnnnnnnnnnnnnnnnnnnnnnnnnnnnnnnnnnnnnnnnnnnnnnnnnnnnnnnnnnnnnnnnnnnnnnnnnnnnnnnnnnnnnnnnnnnnnnnnnnnnnnnnnnnnnnnnnnnnnnnnnnnnnnnnnnnnnnnnnnnnnnnnnnnnnnnnnnnnnnnnnnnnnnnnnnnnnnnnnnnnnnnnnnnnnnnnnnnnnnnnnnnnnnnnnnnnnnnnnnnnnnnnnnnnnnnnnnnnnnnnnnnnnnnnnnnnnnnnnnnnnnnnnnnnnnnnnnnnnnnnnnnnnnnnnnnnnnnnnnnnnnnnnnnnnnnnnnnnnnnnnnnnnnnnnnnnnnnnnnnnnnnnnnnnnnnnnnnnnnnnnnnnnnnnnnnnnnnnnnnnnnnnnnnnnnnnnnnnnnnnnnnnnnnnnnnnnnnnnnnnnnnnnnnnnnnnnnnnnnnnnnnnnnnnnnnnnnnnnnnnnnnnnnnnnnnnnnnnnnnnnnnnnnnnnnnnnnnnnnnnnnnnnnnnnnnnnnnnnnnnnnnnnnnnnnnnnnnnnnnnnnnnnnnnnnnnnnnnnnnnnnnnnnnnnnnnnnnnnnnnnnnnnnnnnnnnnnnnnnnnnnnnnnnnnnnnnnnnnnnnnnnnnnnnnnnnnnnnnnnnnnnnnnnnnnnnnnnnnnnnnnnnnnnnnnnnnnnnnnnnnnnnnnnnnnnnnnnnnnnnnnnnnnnnnnnnnnnnnnnnnnnnnnnnnnnnnnnnnnnnnnnnnnnnnnnnnnnnnnnnnnnnnnnnnnnnnnnnnnnnnnnnnnnnnnnnnnnnnnnnnnnnnnnnnnnnnnnnnnnnnnnnnnnnnnnnnnnnnnnnnnnnnnnnnnnnnnnnnnnnnnnnnnnnnnnnnnnnnnnnnnnnnnnnnnnnnnnnnnnnnnnnnnnnnnnnnnnnnnnnnnnnnnnnnnnnnnnnnnnnnnnnnnnnnnnnnnnnnnnnnnnnnnnnnnnnnnnnnnnnnnnnnnnnnnnnnnnnnnnnnnnnnnnnnnnnnnnnnnnnnnnnnnnnnnnnnnnnnnnnnnnnnnnnnnnnnnnnnnnnnnnnnnnnnnnnnnnnnnnnnnnnnnnnnnnnnnnnnnnnnnnnnnnnnnnnnnnnnnnnnnnnnnnnnnnnnnnnnnnnnnnnnnnnnnnnnnnnnnnnnnnnnnnnnnnnnnnnnnnnnnnnnnnnnnnnnnnnnnnnnnnnnnnnnnnnnnnnnnnnnnnnnnnnnnnnnnnnnnnnnnnnnnnnnnnnnnnnnnnnnnnnnnnnnnnnnnnnnnnnnnnnnnnnnnnnnnnnnnnnnnnnnnnnnnnnnnnnnnnnnnnnnnnnnnnnnnnnnnnnnnnnnnnnnnnnnnnnnnnnnnnnnnnnnnnnnnnnnnnnnnnnnnnnnnnnnnnnnnnnnnnnnnnnnnnnnnnnnnnnnnnnnnnnnnnnnnnnnnnnnnnnnnnnnnnnnnnnnnnnnnnnnnnnnnnnnnnnnnnnnnnnnnnnnnnnnnnnnnnnnnnnnnnnnnnnnnnnnnnnnnnnnnnnnnnnnnnnnnnnnnnnnnnnnnnnnnnnnnnnnnnnnnnnnnnnnnnnnnnnnnnnnnnnnnnnnnnnnnnnnnnnnnnnnnnnnnnnnnnnnnnnnnnnnnnnnnnnnnnnnnnnnnnnnnnnnnnnnnnnnnnnnnnnnnnnnnnnnnnnnnnnnnnnnnnnnnnnnnnnnnnnnnnnnnnnnnnnnnnnnnnnnnnnnnnnnnnnnnnnnnnnnnnnnnnnnnnnnnnnnnnnnnnnnnnnnnnnnnnnnnnnnnnnnnnnnnnnnnnnnnnnnnnnnnnnnnnnnnnnnnnnnnnnnnnnnnnnnnnnnnnnnnnnnnnnnnnnnnnnnnnnnnnnnnnnnnnnnnnnnnnnnnnnnnnnnnnnnnnnnnnnnnnnnnnnnnnnnnnnnnnnnnnnnnnnnnnnnnnnnnnnnnnnnnnnnnnnnnnnnnnnnnnnnnnnnnnnnnnnnnnnnnnnnnnnnnnnnnnnnnnnnnnnnnnnnnnnnnnnnnnnnnnnnnnnnnnnnnnnnnnnnnnnnnnnnnnnnnnnnnnnnnnnnnnnnnnnnnnnnnnnnnnnnnnnnnnnnnnnnnnnnnnnnnnnnnnnnnnnnnnnnnnnnnnnnnnnnnnnnnnnnnnnnnnnnnnnnnnnnnnnnnnnnnnnnnnnnnnnnnnnnnnnnnnnnnnnnnnnnnnnnnnnnnnnnnnnnnnnnnnnnnnnnnnnnnnnnnnnnnnnnnnnnnnnnnnnnnnnnnnnnnnnnnnnnnnnnnnnnnnnnnnnnnnnnnnnnnnnnnnnnnnnnnnnnnnnnnnnnnnnnnnnnnnnnnnnnnnnnnnnnnnnnnnnnnnnnnnnnnnnnnnnnnnnnnnnnnnnnnnnnnnnnnnnnnnnnnnnnnnnnnnnnnnnnnnnnnnnnnnnnnnnnnnnnnnnnnnnnnnnnnnnnnnnnnnnnnnnnnnnnnnnnnnnnnnnnnnnnnnnnnnnnnnnnnnnnnnnnnnnnnnnnnnnnnnnnnnnnnnnnnnnnnnnnnnnnnnnnnnnnnnnnnnnnnnnnnnnnnnnnnnnnnnnnnnnnnnnnnnnnnnnnnnnnnnnnnnnnnnnnnnnnnnnnnnnnnnnnnnnnnnnnnnnnnnnnnnnnnnnnnnnnnnnnnnnnnnnnnnnnnnnnnnnnnnnnnnnnnnnnnnnnnnnnnnnnnnnnnnnnnnnnnnnnnnnnnnnnnnnnnnnnnnnnnnnnnnnnnnnnnnnnnnnnnnnnnnnnnnnnnnnnnnnnnnnnnnnnnnnnnnnnnnnnnnnnnnnnnnnnnnnnnnnnnnnnnnnnnnnnnnnnnnnnnnnnnnnnnnnnnnnnnnnnnnnnnnnnnnnnnnnnnnnnnnnnnnnnnnnnnnnnnnnnnnnnnnnnnnnnnnnnnnnnnnnnnnnnnnnnnnnnnnnnnnnnnnnnnnnnnnnnnnnnnnnnnnnnnnnnnnnnnnnnnnnnnnnnnnnnnnnnnnnnnnnnnnnnnnnnnnnnnnnnnnnnnnnnnnnnnnnnnnnnnnnnnnnnnnnnnnnnnnnnnnnnnnnnnnnnnnnnnnnnnnnnnnnnnnnnnnnnnnnnnnnnnnnnnnnnnnnnnnnnnnnnnnnnnnnnnnnnnnnnnnnnnnnnnnnnnnnnnnnnnnnnnnnnnnnnnnnnnnnnnnnnnnnnnnnnnnnnnnnnnnnnnnnnnnnnnnnnnnnnnnnnnnnnnnnnnnnnnnnnnnnnnnnnnnnnnnnnnnnnnnnnnnnnnnnnnnnnnnnnnnnnnnnnnnnnnnnnnnnnnnnnnnnnnnnnnnnnnnnnnnnnnnnnnnnnnnnnnnnnnnnnnnnnnnnnnnnnnnnnnnnnnnnnnnnnnnnnnnnnnnnnnnnnnnnnnnnnnnnnnnnnnnnnnnnnnnnnnnnnnnnnnnnnnnnnnnnnnnnnnnnnnnnnnnnnnnnnnnnnnnnnnnnnnnnnnnnnnnnnnnnnnnnnnnnnnnnnnnnnnnnnnnnnnnnnnnnnnnnnnnnnnnnnnnnnnnnnnnnnnnnnnnnnnnnnnnnnnnnnnnnnnnnnnnnnnnnnnnnnnnnnnnnnnnnnnnnnnnnnnnnnnnnnnnnnnnnnnnnnnnnnnnnnnnnnnnnnnnnnnnnnnnnnnnnnnnnnnnnnnnnnnnnnnnnnnnnnnnnnnnnnnnnnnnnnnnnnnnnnnnnnnnnnnnnnnnnnnnnnnnnnnnnnnnnnnnnnnnnnnnnnnnnnnnnnnnnnnnnnnnnnnnnnnnnnnnnnnnnnnnnnnnnnnnnnnnnnnnnnnnnnnnnnnnnnnnnnnnnnnnnnnnnnnnnnnnnnnnnnnnnnnnnnnnnnnnnnnnnnnnnnnnnnnnnnnnnnnnnnnnnnnnnnnnnnnnnnnnnnnnnnnnnnnnnnnnnnnnnnnnnnnnnnnnnnnnnnnnnnnnnnnnnnnnnnnnnnnnnnnnnnnnnnnnnnnnnnnnnnnnnnnnnnnnnnnnnnnnnnnnnnnnnnnnnnnnnnnnnnnnnnnnnnnnnnnnnnnnnnnnnnnnnnnnnnnnnnnnnnnnnnnnnnnnnnnnnnnnnnnnnnnnnnnnnnnnnnnnnnnnnnnnnnnnnnnnnnnnnnnnnnnnnnnnnnnnnnnnnnnnnnnnnnnnnnnnnnnnnnnnnnnnnnnnnnnnnnnnnnnnnnnnnnnnnnnnnnnnnnnnnnnnnnnnnnnnnnnnnnnnnnnnnnnnnnnnnnnnnnnnnnnnnnnnnnnnnnnnnnnnnnnnnnnnnnnnnnnnnnnnnnnnnnnnnnnnnnnnnnnnnnnnnnnnnnnnnnnnnnnnnnnnnnnnnnnnnnnnnnnnnnnnnnnnnnnnnnnnnnnnnnnnnnnnnnnnnnnnnnnnnnnnnnnnnnnnnnnnnnnnnnnnnnnnnnnnnnnnnnnnnnnnnnnnnnnnnnnnnnnnnnnnnnnnnnnnnnnnnnnnnnnnnnnnnnnnnnnnnnnnnnnnnnnnnnnnnnnnnnnnnnnnnnnnnnnnnnnnnnnnnnnnnnnnnnnnnnnnnnnnnnnnnnnnnnnnnnnnnnnnnnnnnnnnnnnnnnnnnnnnnnnnnnnnnnnnnnnnnnnnnnnnnnnnnnnnnnnnnnnnnnnnnnnnnnnnnnnnnnnnnnnnnnnnnnnnnnnnnnnnnnnnnnnnnnnnnnnnnnnnnnnnnnnnnnnnnnnnnnnnnnnnnnnnnnnnnnnnnnnnnnnnnnnnnnnnnnnnnnnnnnnnnnnnnnnnnnnnnnnnnnnnnnnnnnnnnnnnnnnnnnnnnnnnnnnnnnnnnnnnnnnnnnnnnnnnnnnnnnnnnnnnnnnnnnnnnnnnnnnnnnnnnnnnnnnnnnnnnnnnnnnnnnnnnnnnnnnnnnnnnnnnnnnnnnnnnnnnnnnnnnnnnnnnnnnnnnnnnnnnnnnnnnnnnnnnnnnnnnnnnnnnnnnnnnnnnnnnnnnnnnnnnnnnnnnnnnnnnnnnnnnnnnnnnnnnnnnnnnnnnnnnnnnnnnnnnnnnnnnnnnnnnnnnnnnnnnnnnnnnnnnnnnnnnnnnnnnnnnnnnnnnnnnnnnnnnnnnnnnnnnnnnnnnnnnnnnnnnnnnnnnnnnnnnnnnnnnnnnnnnnnnnnnnnnnnnnnnnnnnnnnnnnnnnnnnnnnnnnnnnnnnnnnnnnnnnnnnnnnnnnnnnnnnnnnnnnnnnnnnnnnnnnnnnnnnnnnnnnnnnnnnnnnnnnnnnnnnnnnnnnnnnnnnnnnnnnnnnnnnnnnnnnnnnnnnnnnnnnnnnnnnnnnnnnnnnnnnnnnnnnnnnnnnnnnnnnnnnnnnnnnnnnnnnnnnnnnnnnnnnnnnnnnnnnnnnnnnnnnnnnnnnnnnnnnnnnnnnnnnnnnnnnnnnnnnnnnnnnnnnnnnnnnnnnnnnnnnnnnnnnnnnnnnnnnnnnnnnnnnnnnnnnnnnnnnnnnnnnnnnnnnnnnnnnnnnnnnnnnnnnnnnnnnnnnnnnnnnnnnnnnnnnnnnnnnnnnnnnnnnnnnnnnnnnnnnnnnnnnnnnnnnnnnnnnnnnnnnnnnnnnnnnnnnnnnnnnnnnnnnnnnnnnnnnnnnnnnnnnnnnnnnnnnnnnnnnnnnnnnnnnnnnnnnnnnnnnnnnnnnnnnnnnnnnnnnnnnnnnnnnnnnnnnnnnnnnnnnnnnnnnnnnnnnnnnnnnnnnnnnnnnnnnnnnnnnnnnnnnnnnnnnnnnnnnnnnnnnnnnnnnnnnnnnnnnnnnnnnnnnnnnnnnnnnnnnnnnnnnnnnnnnnnnnnnnnnnnnnnnnnnnnnnnnnnnnnnnnnnnnnnnnnnnnnnnnnnnnnnnnnnnnnnnnnnnnnnnnnnnnnnnnnnnnnnnnnnnnnnnnnnnnnnnnnnnnnnnnnnnnnnnnnnnnnnnnnnnnnnnnnnnnnnnnnnnnnnnnnnnnnnnnnnnnnnnnnnnnnnnnnnnnnnnnnnnnnnnnnnnnnnnnnnnnnnnnnnnnnnnnnnnnnnnnnnnnnnnnnnnnnnnnnnnnnnnnnnnnnnnnnnnnnnnnnnnnnnnnnnnnnnnnnnnnnnnnnnnnnnnnnnnnnnnnnnnnnnnnnnnnnnnnnnnnnnnnnnnnnnnnnnnnnnnnnnnnnnnnnnnnnnnnnnnnnnnnnnnnnnnnnnnnnnnnnnnnnnnnnnnnnnnnnnnnnnnnnnnnnnnnnnnnnnnnnnnnnnnnnnnnnnnnnnnnnnnnnnnnnnnnnnnnnnnnnnnnnnnnnnnnnnnnnnnnnnnnnnnnnnnnnnnnnnnnnnnnnnnnnnnnnnnnnnnnnnnnnnnnnnnnnnnnnnnnnnnnnnnnnnnnnnnnnnnnnnnnnnnnnnnnnnnnnnnnnnnnnnnnnnnnnnnnnnnnnnnnnnnnnnnnnnnnnnnnnnnnnnnnnnnnnnnnnnnnnnnnnnnnnnnnnnnnnnnnnnnnnnnnnnnnnnnnnnnnnnnnnnnnnnnnnnnnnnnnnnnnnnnnnnnnnnnnnnnnnnnnnnnnnnnnnnnnnnnnnnnnnnnnnnnnnnnnnnnnnnnnnnnnnnnnnnnnnnnnnnnnnnnnnnnnnnnnnnnnnnnnnnnnnnnnnnnnnnnnnnnnnnnnnnnnnnnnnnnnnnnnnnnnnnnnnnnnnnnnnnnnnnnnnnnnnnnnnnnnnnnnnnnnnnnnnnnnnnnnnnnnnnnnnnnnnnnnnnnnnnnnnnnnnnnnnnnnnnnnnnnnnnnnnnnnnnnnnnnnnnnnnnnnnnnnnnnnnnnnnnnnnnnnnnnnnnnnnnnnnnnnnnnnnnnnnnnnnnnnnnnnnnnnnnnnnnnnnnnnnnnnnnnnnnnnnnnnnnnnnnnnnnnnnnnnnnnnnnnnnnnnnnnnnnnnnnnnnnnnnnnnnnnnnnnnnnnnnnnnnnnnnnnnnnnnnnnnnnnnnnnnnnnnnnnnnnnnnnnnnnnnnnnnnnnnnnnnnnnnnnnnnnnnnnnnnnnnnnnnnnnnnnnnnnnnnnnnnnnnnnnnnnnnnnnnnnnnnnnnnnnnnnnnnnnnnnnnnnnnnnnnnnnnnnnnnnnnnnnnnnnnnnnnnnnnnnnnnnnnnnnnnnnnnnnnnnnnnnnnnnnnnnnnnnnnnnnnnnnnnnnnnnnnnnnnnnnnnnnnnnnnnnnnnnnnnnnnnnnnnnnnnnnnnnnnnnnnnnnnnnnnnnnnnnnnnnnnnnnnnnnnnnnnnnnnnnnnnnnnnnnnnnnnnnnnnnnnnnnnnnnnnnnnnnnnnnnnnnnnnnnnnnnnnnnnnnnnnnnnnnnnnnnnnnnnnnnnnnnnnnnnnnnnnnnnnnnnnnnnnnnnnnnnnnnnnnnnnnnnnnnnnnnnnnnnnnnnnnnnnnnnnnnnnnnnnnnnnnnnnnnnnnnnnnnnnnnnnnnnnnnnnnnnnnnnnnnnnnnnnnnnnnnnnnnnnnnnnnnnnnnnnnnnnnnnnnnnnnnnnnnnnnnnnnnnnnnnnnnnnnnnnnnnnnnnnnnnnnnnnnnnnnnnnnnnnnnnnnnnnnnnnnnnnnnnnnnnnnnnnnnnnnnnnnnnnnnnnnnnnnnnnnnnnnnnnnnnnnnnnnnnnnnnnnnnnnnnnnnnnnnnnnnnnnnnnnnnnnnnnnnnnnnnnnnnnnnnnnnnnnnnnnnnnnnnnnnnnnnnnnnnnnnnnnnnnnnnnnnnnnnnnnnnnnnnnnnnnnnnnnnnnnnnnnnnnnnnnnnnnnnnnnnnnnnnnnnnnnnnnnnnnnnnnnnnnnnnnnnnnnnnnnnnnnnnnnnnnnnnnnnnnnnnnnnnnnnnnnnnnnnnnnnnnnnnnnnnnnnnnnnnnnnnnnnnnnnnnnnnnnnnnnnnnnnnnnnnnnnnnnnnnnnnnnnnnnnnnnnnnnnnnnnnnnnnnnnnnnnnnnnnnnnnnnnnnnnnnnnnnnnnnnnnnnnnnnnnnnnnnnnnnnnnnnnnnnnnnnnnnnnnnnnnnnnnnnnnnnnnnnnnnnnnnnnnnnnnnnnnnnnnnnnnnnnnnnnnnnnnnnnnnnnnnnnnnnnnnnnnnnnnnnnnnnnnnnnnnnnnnnnnnnnnnnnnnnnnnnnnnnnnnnnnnnnnnnnnnnnnnnnnnnnnnnnnnnnnnnnnnnnnnnnnnnnnnnnnnnnnnnnnnnnnnnnnnnnnnnnnnnnnnnnnnnnnnnnnnnnnnnnnnnnnnnnnnnnnnnnnnnnnnnnnnnnnnnnnnnnnnnnnnnnnnnnnnnnnnnnnnnnnnnnnnnnnnnnnnnnnnnnnnnnnnnnnnnnnnnnnnnnnnnnnnnnnnnnnnnnnnnnnnnnnnnnnnnnnnnnnnnnnnnnnnnnnnnnnnnnnnnnnnnnnnnnnnnnnnnnnnnnnnnnnnnnnnnnnnnnnnnnnnnnnnnnnnnnnnnnnnnnnnnnnnnnnnnnnnnnnnnnnnnnnnnnnnnnnnnnnnnnnnnnnnnnnnnnnnnnnnnnnnnnnnnnnnnnnnnnnnnnnnnnnnnnnnnnnnnnnnnnnnnnnnnnnnnnnnnnnnnnnnnnnnnnnnnnnnnnnnnnnnnnnnnnnnnnnnnnnnnnnnnnnnnnnnnnnnnnnnnnnnnnnnnnnnnnnnnnnnnnnnnnnnnnnnnnnnnnnnnnnnnnnnnnnnnnnnnnnnnnnnnnnnnnnnnnnnnnnnnnnnnnnnnnnnnnnnnnnnnnnnnnnnnnnnnnnnnnnnnnnnnnnnnnnnnnnnnnnnnnnnnnnnnnnnnnnnnnnnnnnnnnnnnnnnnnnnnnnnnnnnnnnnnnnnnnnnnnnnnnnnnnnnnnnnnnnnnnnnnnnnnnnnnnnnnnnnnnnnnnnnnnnnnnnnnnnnnnnnnnnnnnnnnnnnnnnnnnnnnnnnnnnnnnnnnnnnnnnnnnnnnnnnnnnnnnnnnnnnnnnnnnnnnnnnnnnnnnnnnnnnnnnnnnnnnnnnnnnnnnnnnnnnnnnnnnnnnnnnnnnnnnnnnnnnnnnnnnnnnnnnnnnnnnnnnnnnnnnnnnnnnnnnnnnnnnnnnnnnnnnnnnnnnnnnnnnnnnnnnnnnnnnnnnnnnnnnnnnnnnnnnnnnnnnnnnnnnnnnnnnnnnnnnnnnnnnnnnnnnnnnnnnnnnnnnnnnnnnnnnnnnnnnnnnnnnnnnnnnnnnnnnnnnnnnnnnnnnnnnnnnnnnnnnnnnnnnnnnnnnnnnnnnnnnnnnnnnnnnnnnnnnnnnnnnnnnnnnnnnnnnnnnnnnnnnnnnnnnnnnnnnnnnnnnnnnnnnnnnnnnnnnnnnnnnnnnnnnnnnnnnnnnnnnnnnnnnnnnnnnnnnnnnnnnnnnnnnnnnnnnnnnnnnnnnnnnnnnnnnnnnnnnnnnnnnnnnnnnnnnnnnnnnnnnnnnnnnnnnnnnnnnnnnnnnnnnnnnnnnnnnnnnnnnnnnnnnnnnnnnnnnnnnnnnnnnnnnnnnnnnnnnnnnnnnnnnnnnnnnnnnnnnnnnnnnnnnnnnnnnnnnnnnnnnnnnnnnnnnnnnnnnnnnnnnnnnnnnnnnnnnnnnnnnnnnnnnnnnnnnnnnnnnnnnnnnnnnnnnnnnnnnnnnnnnnnnnnnnnnnnnnnnnnnnnnnnnnnnnnnnnnnnnnnnnnnnnnnnnnnnnnnnnnnnnnnnnnnnnnnnnnnnnnnnnnnnnnnnnnnnnnnnnnnnnnnnnnnnnnnnnnnnnnnnnnnnnnnnnnnnnnnnnnnnnnnnnnnnnnnnnnnnnnnnnnnnnnnnnnnnnnnnnnnnnnnnnnnnnnnnnnnnnnnnnnnnnnnnnnnnnnnnnnnnnnnnnnnnnnnnnnnnnnnnnnnnnnnnnnnnnnnnnnnnnnnnnnnnnnnnnnnnnnnnnnnnnnnnnnnnnnnnnnnnnnnnnnnnnnnnnnnnnnnnnnnnnnnnnnnnnnnnnnnnnnnnnnnnnnnnnnnnnnnnnnnnnnnnnnnnnnnnnnnnnnnnnnnnnnnnnnnnnnnnnnnnnnnnnnnnnnnnnnnnnnnnnnnnnnnnnnnnnnnnnnnnnnnnnnnnnnnnnnnnnnnnnnnnnnnnnnnnnnnnnnnnnnnnnnnnnnnnnnnnnnnnnnnnnnnnnnnnnnnnnnnnnnnnnnnnnnnnnnnnnnnnnnnnnnnnnnnnnnnnnnnnnnnnnnnnnnnnnnnnnnnnnnnnnnnnnnnnnnnnnnnnnnnnnnnnnnnnnnnnnnnnnnnnnnnnnnnnnnnnnnnnnnnnnnnnnnnnnnnnnnnnnnnnnnnnnnnnnnnnnnnnnnnnnnnnnnnnnnnnnnnnnnnnnnnnnnnnnnnnnnnnnnnnnnnnnnnnnnnnnnnnnnnnnnnnnnnnnnnnnnnnnnnnnnnnnnnnnnnnnnnnnnnnnnnnnnnnnnnnnnnnnnnnnnnnnnnnnnnnnnnnnnnnnnnnnnnnnnnnnnnnnnnnnnnnnnnnnnnnnnnnnnnnnnnnnnnnnnnnnnnnnnnnnnnnnnnnnnnnnnnnnnnnnnnnnnnnnnnnnnnnnnnnnnnnnnnnnnnnnnnnnnnnnnnnnnnnnnnnnnnnnnnnnnnnnnnnnnnnnnnnnnnnnnnnnnnnnnnnnnnnnnnnnnnnnnnnnnnnnnnnnnnnnnnnnnnnnnnnnnnnnnnnnnnnnnnnnnnnnnnnnnnnnnnnnnnnnnnnnnnnnnnnnnnnnnnnnnnnnnnnnnnnnnnnnnnnnnnnnnnnnnnnnnnnnnnnnnnnnnnnnnnnnnnnnnnnnnnnnnnnnnnnnnnnnnnnnnnnnnnnnnnnnnnnnnnnnnnnnnnnnnnnnnnnnnnnnnnnnnnnnnnnnnnnnnnnnnnnnnnnnnnnnnnnnnnnnnnnnnnnnnnnnnnnnnnnnnnnnnnnnnnnnnnnnnnnnnnnnnnnnnnnnnnnnnnnnnnnnnnnnnnnnnnnnnnnnnnnnnnnnnnnnnnnnnnnnnnnnnnnnnnnnnnnnnnnnnnnnnnnnnnnnnnnnnnnnnnnnnnnnnnnnnnnnnnnnnnnnnnnnnnnnnnnnnnnnnnnnnnnnnnnnnnnnnnnnnnnnnnnnnnnnnnnnnnnnnnnnnnnnnnnnnnnnnnnnnnnnnnnnnnnnnnnnnnnnnnnnnnnnnnnnnnnnnnnnnnnnnnnnnnnnnnnnnnnnnnnnnnnnnnnnnnnnnnnnnnnnnnnnnnnnnnnnnnnnnnnnnnnnnnnnnnnnnnnnnnnnnnnnnnnnnnnnnnnnnnnnnnnnnnnnnnnnnnnnnnnnnnnnnnnnnnnnnnnnnnnnnnnnnnnnnnnnnnnnnnnnnnnnnnnnnnnnnnnnnnnnnnnnnnnnnnnnnnnnnnnnnnnnnnnnnnnnnnnnnnnnnnnnnnnnnnnnnnnnnnnnnnnnnnnnnnnnnnnnnnnnnnnnnnnnnnnnnnnnnnnnnnnnnnnnnnnnnnnnnnnnnnnnnnnnnnnnnnnnnnnnnnnnnnnnnnnnnnnnnnnnnnnnnnnnnnnnnnnnnnnnnnnnnnnnnnnnnnnnnnnnnnnnnnnnnnnnnnnnnnnnnnnnnnnnnnnnnnnnnnnnnnnnnnnnnnnnnnnnnnnnnnnnnnnnnnnnnnnnnnnnnnnnnnnnnnnnnnnnnnnnnnnnnnnnnnnnnnnnnnnnnnnnnnnnnnnnnnnnnnnnnnnnnnnnnnnnnnnnnnnnnnnnnnnnnnnnnnnnnnnnnnnnnnnnnnnnnnnnnnnnnnnnnnnnnnnnnnnnnnnnnnnnnnnnnnnnnnnnnnnnnnnnnnnnnnnnnnnnnnnnnnnnnnnnnnnnnnnnnnnnnnnnnnnnnnnnnnnnnnnnnnnnnnnnnnnnnnnnnnnnnnnnnnnnnnnnnnnnnnnnnnnnnnnnnnnnnnnnnnnnnnnnnnnnnnnnnnnnnnnnnnnnnnnnnnnnnnnnnnnnnnnnnnnnnnnnnnnnnnnnnnnnnnnnnnnnnnnnnnnnnnnnnnnnnnnnnnnnnnnnnnnnnnnnnnnnnnnnnnnnnnnnnnnnnnnnnnnnnnnnnnnnnnnnnnnnnnnnnnnnnnnnnnnnnnnnnnnnnnnnnnnnnnnnnnnnnnnnnnnnnnnnnnnnnnnnnnnnnnnnnnnnnnnnnnnnnnnnnnnnnnnnnnnnnnnnnnnnnnnnnnnnnnnnnnnnnnnnnnnnnnnnnnnnnnnnnnnnnnnnnnnnnnnnnnnnnnnnnnnnnnnnnnnnnnnnnnnnnnnnnnnnnnnnnnnnnnnnnnnnnnnnnnnnnnnnnnnnnnnnnnnnnnnnnnnnnnnnnnnnnnnnnnnnnnnnnnnnnnnnnnnnnnnnnnnnnnnnnnnnnnnnnnnnnnnnnnnnnnnnnnnnnnnnnnnnnnnnnnnnnnnnnnnnnnnnnnnnnnnnnnnnnnnnnnnnnnnnnnnnnnnnnnnnnnnnnnnnnnnnnnnnnnnnnnnnnnnnnnnnnnnnnnnnnnnnnnnnnnnnnnnnnnnnnnnnnnnnnnnnnnnnnnnnnnnnnnnnnnnnnnnnnnnnnnnnnnnnnnnnnnnnnnnnnnnnnnnnnnnnnnnnnnnnnnnnnnnnnnnnnnnnnnnnnnnnnnnnnnnnnnnnnnnnnnnnnnnnnnnnnnnnnnnnnnnnnnnnnnnnnnnnnnnnnnnnnnnnnnnnnnnnnnnnnnnnnnnnnnnnnnnnnnnnnnnnnnnnnnnnnnnnnnnnnnnnnnnnnnnnnnnnnnnnnnnnnnnnnnnnnnnnnnnnnnnnnnnnnnnnnnnnnnnnnnnnnnnnnnnnnnnnnnnnnnnnnnnnnnnnnnnnnnnnnnnnnnnnnnnnnnnnnnnnnnnnnnnnnnnnnnnnnnnnnnnnnnnnnnnnnnnnnnnnnnnnnnnnnnnnnnnnnnnnnnnnnnnnnnnnnnnnnnnnnnnnnnnnnnnnnnnnnnnnnnnnnnnnnnnnnnnnnnnnnnnnnnnnnnnnnnnnnnnnnnnnnnnnnnnnnnnnnnnnnnnnnnnnnnnnnnnnnnnnnnnnnnnnnnnnnnnnnnnnnnnnnnnnnnnnnnnnnnnnnnnnnnnnnnnnnnnnnnnnnnnnnnnnnnnnnnnnnnnnnnnnnnnnnnnnnnnnnnnnnnnnnnnnnnnnnnnnnnnnnnnnnnnnnnnnnnnnnnnnnnnnnnnnnnnnnnnnnnnnnnnnnnnnnnnnnnnnnnnnnnnnnnnnnnnnnnnnnnnnnnnnnnnnnnnnnnnnnnnnnnnnnnnnnnnnnnnnnnnnnnnnnnnnnnnnnnnnnnnnnnnnnnnnnnnnnnnnnnnnnnnnnnnnnnnnnnnnnnnnnnnnnnnnnnnnnnnnnnnnnnnnnnnnnnnnnnnnnnnnnnnnnnnnnnnnnnnnnnnnnnnnnnnnnnnnnnnnnnnnnnnnnnnnnnnnnnnnnnnnnnnnnnnnnnnnnnnnnnnnnnnnnnnnnnnnnnnnnnnnnnnnnnnnnnnnnnnnnnnnnnnnnnnnnnnnnnnnnnnnnnnnnnnnnnnnnnnnnnnnnnnnnnnnnnnnnnnnnnnnnnnnnnnnnnnnnnnnnnnnnnnnnnnnnnnnnnnnnnnnnnnnnnnnnnnnnnnnnnnnnnnnnnnnnnnnnnnnnnnnnnnnnnnnnnnnnnnnnnnnnnnnnnnnnnnnnnnnnnnnnnnnnnnnnnnnnnnnnnnnnnnnnnnnnnnnnnnnnnnnnnnnnnnnnnnnnnnnnnnnnnnnnnnnnnnnnnnnnnnnnnnnnnnnnnnnnnnnnnnnnnnnnnnnnnnnnnnnnnnnnnnnnnnnnnnnnnnnnnnnnnnnnnnnnnnnnnnnnnnnnnnnnnnnnnnnnnnnnnnnnnnnnnnnnnnnnnnnnnnnnnnnnnnnnnnnnnnnnnnnnnnnnnnnnnnnnnnnnnnnnnnnnnnnnnnnnnnnnnnnnnnnnnnnnnnnnnnnnnnnnnnnnnnnnnnnnnnnnnnnnnnnnnnnnnnnnnnnnnnnnnnnnnnnnnnnnnnnnnnnnnnnnnnnnnnnnnnnnnnnnnnnnnnnnnnnnnnnnnnnnnnnnnnnnnnnnnnnnnnnnnnnnnnnnnnnnnnnnnnnnnnnnnnnnnnnnnnnnnnnnnnnnnnnnnnnnnnnnnnnnnnnnnnnnnnnnnnnnnnnnnnnnnnnnnnnnnnnnnnnnnnnnnnnnnnnnnnnnnnnnnnnnnnnnnnnnnnnnnnnnnnnnnnnnnnnnnnnnnnnnnnnnnnnnnnnnnnnnnnnnnnnnnnnnnnnnnnnnnnnnnnnnnnnnnnnnnnnnnnnnnnnnnnnnnnnnnnnnnnnnnnnnnnnnnnnnnnnnnnnnnnnnnnnnnnnnnnnnnnnnnnnnnnnnnnnnnnnnnnnnnnnnnnnnnnnnnnnnnnnnnnnnnnnnnnnnnnnnnnnnnnnnnnnnnnnnnnnnnnnnnnnnnnnnnnnnnnnnnnnnnnnnnnnnnnnnnnnnnnnnnnnnnnnnnnnnnnnnnnnnnnnnnnnnnnnnnnnnnnnnnnnnnnnnnnnnnnnnnnnnnnnnnnnnnnnnnnnnnnnnnnnnnnnnnnnnnnnnnnnnnnnnnnnnnnnnnnnnnnnnnnnnnnnnnnnnnnnnnnnnnnnnnnnnnnnnnnnnnnnnnnnnnnnnnnnnnnnnnnnnnnnnnnnnnnnnnnnnnnnnnnnnnnnnnnnnnnnnnnnnnnnnnnnnnnnnnnnnnnnnnnnnnnnnnnnnnnnnnnnnnnnnnnnnnnnnnnnnnnnnnnnnnnnnnnnnnnnnnnnnnnnnnnnnnnnnnnnnnnnnnnnnnnnnnnnnnnnnnnnnnnnnnnnnnnnnnnnnnnnnnnnnnnnnnnnnnnnnnnnnnnnnnnnnnnnnnnnnnnnnnnnnnnnnnnnnnnnnnnnnnnnnnnnnnnnnnnnnnnnnnnnnnnnnnnnnnnnnnnnnnnnnnnnnnnnnnnnnnnnnnnnnnnnnnnnnnnnnnnnnnnnnnnnnnnnnnnnnnnnnnnnnnnnnnnnnnnnnnnnnnnnnnnnnnnnnnnnnnnnnnnnnnnnnnnnnnnnnnnnnnnnnnnnnnnnnnnnnnnnnnnnnnnnnnnnnnnnnnnnnnnnnnnnnnnnnnnnnnnnnnnnnnnnnnnnnnnnnnnnnnnnnnnnnnnnnnnnnnnnnnnnnnnnnnnnnnnnnnnnnnnnnnnnnnnnnnnnnnnnnnnnnnnnnnnnnnnnnnnnnnnnnnnnnnnnnnnnnnnnnnnnnnnnnnnnnnnnnnnnnnnnnnnnnnnnnnnnnnnnnnnnnnnnnnnnnnnnnnnnnnnnnnnnnnnnnnnnnnnnnnnnnnnnnnnnnnnnnnnnnnnnnnnnnnnnnnnnnnnnnnnnnnnnnnnnnnnnnnnnnnnnnnnnnnnnnnnnnnnnnnnnnnnnnnnnnnnnnnnnnnnnnnnnnnnnnnnnnnnnnnnnnnnnnnnnnnnnnnnnnnnnnnnnnnnnnnnnnnnnnnnnnnnnnnnnnnnnnnnnnnnnnnnnnnnnnnnnnnnnnnnnnnnnnnnnnnnnnnnnnnnnnnnnnnnnnnnnnnnnnnnnnnnnnnnnnnnnnnnnnnnnnnnnnnnnnnnnnnnnnnnnnnnnnnnnnnnnnnnnnnnnnnnnnnnnnnnnnnnnnnnnnnnnnnnnnnnnnnnnnnnnnnnnnnnnnnnnnnnnnnnnnnnnnnnnnnnnnnnnnnnnnnnnnnnnnnnnnnnnnnnnnnnnnnnnnnnnnnnnnnnnnnnnnnnnnnnnnnnnnnnnnnnnnnnnnnnnnnnnnnnnnnnnnnnnnnnnnnnnnnnnnnnnnnnnnnnnnnnnnnnnnnnnnnnnnnnnnnnnnnnnnnnnnnnnnnnnnnnnnnnnnnnnnnnnnnnnnnnnnnnnnnnnnnnnnnnnnnnnnnnnnnnnnnnnnnnnnnnnnnnnnnnnnnnnnnnnnnnnnnnnnnnnnnnnnnnnnnnnnnnnnnnnnnnnnnnnnnnnnnnnnnnnnnnnnnnnnnnnnnnnnnnnnnnnnnnnnnnnnnnnnnnnnnnnnnnnnnnnnnnnnnnnnnnnnnnnnnnnnnnnnnnnnnnnnnnnnnnnnnnnnnnnnnnnnnnnnnnnnnnnnnnnnnnnnnnnnnnnnnnnnnnnnnnnnnnnnnnnnnnnnnnnnnnnnnnnnnnnnnnnnnnnnnnnnnnnnnnnnnnnnnnnnnnnnnnnnnnnnnnnnnnnnnnnnnnnnnnnnnnnnnnnnnnnnnnnnnnnnnnnnnnnnnnnnnnnnnnnnnnnnnnnnnnnnnnnnnnnnnnnnnnnnnnnnnnnnnnnnnnnnnnnnnnnnnnnnnnnnnnnnnnnnnnnnnnnnnnnnnnnnnnnnnnnnnnnnnnnnnnnnnnnnnnnnnnnnnnnnnnnnnnnnnnnnnnnnnnnnnnnnnnnnnnnnnnnnnnnnnnnnnnnnnnnnnnnnnnnnnnnnnnnnnnnnnnnnnnnnnnnnnnnnnnnnnnnnnnnnnnnnnnnnnnnnnnnnnnnnnnnnnnnnnnnnnnnnnnnnnnnnnnnnnnnnnnnnnnnnnnnnnnnnnnnnnnnnnnnnnnnnnnnnnnnnnnnnnnnnnnnnnnnnnnnnnnnnnnnnnnnnnnnnnnnnnnnnnnnnnnnnnnnnnnnnnnnnnnnnnnnnnnnnnnnnnnnnnnnnnnnnnnnnnnnnnnnnnnnnnnnnnnnnnnnnnnnnnnnnnnnnnnnnnnnnnnnnnnnnnnnnnnnnnnnnnnnnnnnnnnnnnnnnnnnnnnnnnnnnnnnnnnnnnnnnnnnnnnnnnnnnnnnnnnnnnnnnnnnnnnnnnnnnnnnnnnnnnnnnnnnnnnnnnnnnnnnnnnnnnnnnnnnnnnnnnnnnnnnnnnnnnnnnnnnnnnnnnnnnnnnnnnnnnnnnnnnnnnnnnnnnnnnnnnnnnnnnnnnnnnnnnnnnnnnnnnnnnnnnnnnnnnnnnnnnnnnnnnnnnnnnnnnnnnnnnnnnnnnnnnnnnnnnnnnnnnnnnnnnnnnnnnnnnnnnnnnnnnnnnnnnnnnnnnnnnnnnnnnnnnnnnnnnnnnnnnnnnnnnnnnnnnnnnnnnnnnnnnnnnnnnnnnnnnnnnnnnnnnnnnnnnnnnnnnnnnnnnnnnnnnnnnnnnnnnnnnnnnnnnnnnnnnnnnnnnnnnnnnnnnnnnnnnnnnnnnnnnnnnnnnnnnnnnnnnnnnnnnnnnnnnnnnnnnnnnnnnnnnnnnnnnnnnnnnnnnnnnnnnnnnnnnnnnnnnnnnnnnnnnnnnnnnnnnnnnnnnnnnnnnnnnnnnnnnnnnnnnnnnnnnnnnnnnnnnnnnnnnnnnnnnnnnnnnnnnnnnnnnnnnnnnnnnnnnnnnnnnnnnnnnnnnnnnnnnnnnnnnnnnnnnnnnnnnnnnnnnnnnnnnnnnnnnnnnnnnnnnnnnnnnnnnnnnnnnnnnnnnnnnnnnnnnnnnnnnnnnnnnnnnnnnnnnnnnnnnnnnnnnnnnnnnnnnnnnnnnnnnnnnnnnnnnnnnnnnnnnnnnnnnnnnnnnnnnnnnnnnnnnnnnnnnnnnnnnnnnnnnnnnnnnnnnnnnnnnnnnnnnnnnnnnnnnnnnnnnnnnnnnnnnnnnnnnnnnnnnnnnnnnnnnnnnnnnnnnnnnnnnnnnnnnnnnnnnnnnnnnnnnnnnnnnnnnnnnnnnnnnnnnnnnnnnnnnnnnnnnnnnnnnnnnnnnnnnnnnnnnnnnnnnnnnnnnnnnnnnnnnnnnnnnnnnnnnnnnnnnnnnnnnnnnnnnnnnnnnnnnnnnnnnnnnnnnnnnnnnnnnnnnnnnnnnnnnnnnnnnnnnnnnnnnnnnnnnnnnnnnnnnnnnnnnnnnnnnnnnnnnnnnnnnnnnnnnnnnnnnnnnnnnnnnnnnnnnnnnnnnnnnnnnnnnnnnnnnnnnnnnnnnnnnnnnnnnnnnnnnnnnnnnnnnnnnnnnnnnnnnnnnnnnnnnnnnnnnnnnnnnnnnnnnnnnnnnnnnnnnnnnnnnnnnnnnnnnnnnnnnnnnnnnnnnnnnnnnnnnnnnnnnnnnnnnnnnnnnnnnnnnnnnnnnnnnnnnnnnnnnnnnnnnnnnnnnnnnnnnnnnnnnnnnnnnnnnnnnnnnnnnnnnnnnnnnnnnnnnnnnnnnnnnnnnnnnnnnnnnnnnnnnnnnnnnnnnnnnnnnnnnnnnnnnnnnnnnnnnnnnnnnnnnnnnnnnnnnnnnnnnnnnnnnnnnnnnnnnnnnnnnnnnnnnnnnnnnnnnnnnnnnnnnnnnnnnnnnnnnnnnnnnnnnnnnnnnnnnnnnnnnnnnnnnnnnnnnnnnnnnnnnnnnnnnnnnnnnnnnnnnnnnnnnnnnnnnnnnnnnnnnnnnnnnnnnnnnnnnnnnnnnnnnnnnnnnnnnnnnnnnnnnnnnnnnnnnnnnnnnnnnnnnnnnnnnnnnnnnnnnnnnnnnnnnnnnnnnnnnnnnnnnnnnnnnnnnnnnnnnnnnnnnnnnnnnnnnnnnnnnnnnnnnnnnnnnnnnnnnnnnnnnnnnnnnnnnnnnnnnnnnnnnnnnnnnnnnnnnnnnnnnnnnnnnnnnnnnnnnnnnnnnnnnnnnnnnnnnnnnnnnnnnnnnnnnnnnnnnnnnnnnnnnnnnnnnnnnnnnnnnnnnnnnnnnnnnnnnnnnnnnnnnnnnnnnnnnnnnnnnnnnnnnnnnnnnnnnnnnnnnnnnnnnnnnnnnnnnnnnnnnnnnnnnnnnnnnnnnnnnnnnnnnnnnnnnnnnnnnnnnnnnnnnnnnnnnnnnnnnnnnnnnnnnnnnnnnnnnnnnnnnnnnnnnnnnnnnnnnnnnnnnnnnnnnnnnnnnnnnnnnnnnnnnnnnnnnnnnnnnnnnnnnnnnnnnnnnnnnnnnnnnnnnnnnnnnnnnnnnnnnnnnnnnnnnnnnnnnnnnnnnnnnnnnnnnnnnnnnnnnnnnnnnnnnnnnnnnnnnnnnnnnnnnnnnnnnnnnnnnnnnnnnnnnnnnnnnnnnnnnnnnnnnnnnnnnnnnnnnnnnnnnnnnnnnnnnnnnnnnnnnnnnnnnnnnnnnnnnnnnnnnnnnnnnnnnnnnnnnnnnnnnnnnnnnnnnnnnnnnnnnnnnnnnnnnnnnnnnnnnnnnnnnnnnnnnnnnnnnnnnnnnnnnnnnnnnnnnnnnnnnnnnnnnnnnnnnnnnnnnnnnnnnnnnnnnnnnnnnnnnnnnnnnnnnnnnnnnnnnnnnnnnnnnnnnnnnnnnnnnnnnnnnnnnnnnnnnnnnnnnnnnnnnnnnnnnnnnnnnnnnnnnnnnnnnnnnnnnnnnnnnnnnnnnnnnnnnnnnnnnnnnnnnnnnnnnnnnnnnnnnnnnnnnnnnnnnnnnnnnnnnnnnnnnnnnnnnnnnnnnnnnnnnnnnnnnnnnnnnnnnnnnnnnnnnnnnnnnnnnnnnnnnnnnnnnnnnnnnnnnnnnnnnnnnnnnnnnnnnnnnnnnnnnnnnnnnnnnnnnnnnnnnnnnnnnnnnnnnnnnnnnnnnnnnnnnnnnnnnnnnnnnnnnnnnnnnnnnnnnnnnnnnnnnnnnnnnnnnnnnnnnnnnnnnnnnnnnnnnnnnnnnnnnnnnnnnnnnnnnnnnnnnnnnnnnnnnnnnnnnnnnnnnnnnnnnnnnnnnnnnnnnnnnnnnnnnnnnnnnnnnnnnnnnnnnnnnnnnnnnnnnnnnnnnnnnnnnnnnnnnnnnnnnnnnnnnnnnnnnnnnnnnnnnnnnnnnnnnnnnnnnnnnnnnnnnnnnnnnnnnnnnnnnnnnnnnnnnnnnnnnnnnnnnnnnnnnnnnnnnnnnnnnnnnnnnnnnnnnnnnnnnnnnnnnnnnnnnnnnnnnnnnnnnnnnnnnnnnnnnnnnnnnnnnnnnnnnnnnnnnnnnnnnnnnnnnnnnnnnnnnnnnnnnnnnnnnnnnnnnnnnnnnnnnnnnnnnnnnnnnnnnnnnnnnnnnnnnnnnnnnnnnnnnnnnnnnnnnnnnnnnnnnnnnnnnnnnnnnnnnnnnnnnnnnnnnnnnnnnnnnnnnnnnnnnnnnnnnnnnnnnnnnnnnnnnnnnnnnnnnnnnnnnnnnnnnnnnnnnnnnnnnnnnnnnnnnnnnnnnnnnnnnnnnnnnnnnnnnnnnnnnnnnnnnnnnnnnnnnnnnnnnnnnnnnnnnnnnnnnnnnnnnnnnnnnnnnnnnnnnnnnnnnnnnnnnnnnnnnnnnnnnnnnnnnnnnnnnnnnnnnnnnnnnnnnnnnnnnnnnnnnnnnnnnnnnnnnnnnnnnnnnnnnnnnnnnnnnnnnnnnnnnnnnnnnnnnnnnnnnnnnnnnnnnnnnnnnnnnnnnnnnnnnnnnnnnnnnnnnnnnnnnnnnnnnnnnnnnnnnnnnnnnnnnnnnnnnnnnnnnnnnnnnnnnnnnnnnnnnnnnnnnnnnnnnnnnnnnnnnnnnnnnnnnnnnnnnnnnnnnnnnnnnnnnnnnnnnnnnnnnnnnnnnnnnnnnnnnnnnnnnnnnnnnnnnnnnnnnnnnnnnnnnnnnnnnnnnnnnnnnnnnnnnnnnnnnnnnnnnnnnnnnnnnnnnnnnnnnnnnnnnnnnnnnnnnnnnnnnnnnnnnnnnnnnnnnnnnnnnnnnnnnnnnnnnnnnnnnnnnnnnnnnnnnnnnnnnnnnnnnnnnnnnnnnnnnnnnnnnnnnnnnnnnnnnnnnnnnnnnnnnnnnnnnnnnnnnnnnnnnnnnnnnnnnnnnnnnnnnnnnnnnnnnnnnnnnnnnnnnnnnnnnnnnnnnnnnnnnnnnnnnnnnnnnnnnnnnnnnnnnnnnnnnnnnnnnnnnnnnnnnnnnnnnnnnnnnnnnnnnnnnnnnnnnnnnnnnnnnnnnnnnnnnnnnnnnnnnnnnnnnnnnnnnnnnnnnnnnnnnnnnnnnnnnnnnnnnnnnnnnnnnnnnnnnnnnnnnnnnnnnnnnnnnnnnnnnnnnnnnnnnnnnnnnnnnnnnnnnnnnnnnnnnnnnnnnnnnnnnnnnnnnnnnnnnnnnnnnnnnnnnnnnnnnnnnnnnnnnnnnnnnnnnnnnnnnnnnnnnnnnnnnnnnnnnnnnnnnnnnnnnnnnnnnnnnnnnnnnnnnnnnnnnnnnnnnnnnnnnnnnnnnnnnnnnnnnnnnnnnnnnnnnnnnnnnnnnnnnnnnnnnnnnnnnnnnnnnnnnnnnnnnnnnnnnnnnnnnnnnnnnnnnnnnnnnnnnnnnnnnnnnnnnnnnnnnnnnnnnnnnnnnnnnnnnnnnnnnnnnnnnnnnnnnnnnnnnnnnnnnnnnnnnnnnnnnnnnnnnnnnnnnnnnnnnnnnnnnnnnnnnnnnnnnnnnnnnnnnnnnnnnnnnnnnnnnnnnnnnnnnnnnnnnnnnnnnnnnnnnnnnnnnnnnnnnnnnnnnnnnnnnnnnnnnnnnnnnnnnnnnnnnnnnnnnnnnnnnnnnnnnnnnnnnnnnnnnnnnnnnnnnnnnnnnnnnnnnnnnnnnnnnnnnnnnnnnnnnnnnnnnnnnnnnnnnnnnnnnnnnnnnnnnnnnnnnnnnnnnnnnnnnnnnnnnnnnnnnnnnnnnnnnnnnnnnnnnnnnnnnnnnnnnnnnnnnnnnnnnnnnnnnnnnnnnnnnnnnnnnnnnnnnnnnnnnnnnnnnnnnnnnnnnnnnnnnnnnnnnnnnnnnnnnnnnnnnnnnnnnnnnnnnnnnnnnnnnnnnnnnnnnnnnnnnnnnnnnnnnnnnnnnnnnnnnnnnnnnnnnnnnnnnnnnnnnnnnnnnnnnnnnnnnnnnnnnnnnnnnnnnnnnnnnnnnnnnnnnnnnnnnnnnnnnnnnnnnnnnnnnnnnnnnnnnnnnnnnnnnnnnnnnnnnnnnnnnnnnnnnnnnnnnnnnnnnnnnnnnnnnnnnnnnnnnnnnnnnnnnnnnnnnnnnnnnnnnnnnnnnnnnnnnnnnnnnnnnnnnnnnnnnnnnnnnnnnnnnnnnnnnnnnnnnnnnnnnnnnnnnnnnnnnnnnnnnnnnnnnnnnnnnnnnnnnnnnnnnnnnnnnnnnnnnnnnnnnnnnnnnnnnnnnnnnnnnnnnnnnnnnnnnnnnnnnnnnnnnnnnnnnnnnnnnnnnnnnnnnnnnnnnnnnnnnnnnnnnnnnnnnnnnnnnnnnnnnnnnnnnnnnnnnnnnnnnnnnnnnnnnnnnnnnnnnnnnnnnnnnnnnnnnnnnnnnnnnnnnnnnnnnnnnnnnnnnnnnnnnnnnnnnnnnnnnnnnnnnnnnnnnnnnnnnnnnnnnnnnnnnnnnnnnnnnnnnnnnnnnnnnnnnnnnnnnnnnnnnnnnnnnnnnnnnnnnnnnnnnnnnnnnnnnnnnnnnnnnnnnnnnnnnnnnnnnnnnnnnnnnnnnnnnnnnnnnnnnnnnnnnnnnnnnnnnnnnnnnnnnnnnnnnnnnnnnnnnnnnnnnnnnnnnnnnnnnnnnnnnnnnnnnnnnnnnnnnnnnnnnnnnnnnnnnnnnnnnnnnnnnnnnnnnnnnnnnnnnnnnnnnnnnnnnnnnnnnnnnnnnnnnnnnnnnnnnnnnnnnnnnnnnnnnnnnnnnnnnnnnnnnnnnnnnnnnnnnnnnnnnnnnnnnnnnnnnnnnnnnnnnnnnnnnnnnnnnnnnnnnnnnnnnnnnnnnnnnnnnnnnnnnnnnnnnnnnnnnnnnnnnnnnnnnnnnnnnnnnnnnnnnnnnnnnnnnnnnnnnnnnnnnnnnnnnnnnnnnnnnnnnnnnnnnnnnnnnnnnnnnnnnnnnnnnnnnnnnnnnnnnnnnnnnnnnnnnnnnnnnnnnnnnnnnnnnnnnnnnnnnnnnnnnnnnnnnnnnnnnnnnnnnnnnnnnnnnnnnnnnnnnnnnnnnnnnnnnnnnnnnnnnnnnnnnnnnnnnnnnnnnnnnnnnnnnnnnnnnnnnnnnnnnnnnnnnnnnnnnnnnnnnnnnnnnnnnnnnnnnnnnnnnnnnnnnnnnnnnnnnnnnnnnnnnnnnnnnnnnnnnnnnnnnnnnnnnnnnnnnnnnnnnnnnnnnnnnnnnnnnnnnnnnnnnnnnnnnnnnnnnnnnnnnnnnnnnnnnnnnnnnnnnnnnnnnnnnnnnnnnnnnnnnnnnnnnnnnnnnnnnnnnnnnnnnnnnnnnnnnnnnnnnnnnnnnnnnnnnnnnnnnnnnnnnnnnnnnnnnnnnnnnnnnnnnnnnnnnnnnnnnnnnnnnnnnnnnnnnnnnnnnnnnnnnnnnnnnnnnnnnnnnnnnnnnnnnnnnnnnnnnnnnnnnnnnnnnnnnnnnnnnnnnnnnnnnnnnnnnnnnnnnnnnnnnnnnnnnnnnnnnnnnnnnnnnnnnnnnnnnnnnnnnnnnnnnnnnnnnnnnnnnnnnnnnnnnnnnnnnnnnnnnnnnnnnnnnnnnnnnnnnnnnnnnnnnnnnnnnnnnnnnnnnnnnnnnnnnnnnnnnnnnnnnnnnnnnnnnnnnnnnnnnnnnnnnnnnnnnnnnnnnnnnnnnnnnnnnnnnnnnnnnnnnnnnnnnnnnnnnnnnnnnnnnnnnnnnnnnnnnnnnnnnnnnnnnnnnnnnnnnnnnnnnnnnnnnnnnnnnnnnnnnnnnnnnnnnnnnnnnnnnnnnnnnnnnnnnnnnnnnnnnnnnnnnnnnnnnnnnnnnnnnnnnnnnnnnnnnnnnnnnnnnnnnnnnnnnnnnnnnnnnnnnnnnnnnnnnnnnnnnnnnnnnnnnnnnnnnnnnnnnnnnnnnnnnnnnnnnnnnnnnnnnnnnnnnnnnnnnnnnnnnnnnnnnnnnnnnnnnnnnnnnnnnnnnnnnnnnnnnnnnnnnnnnnnnnnnnnnnnnnnnnnnnnnnnnnnnnnnnnnnnnnnnnnnnnnnnnnnnnnnnnnnnnnnnnnnnnnnnnnnnnnnnnnnnnnnnnnnnnnnnnnnnnnnnnnnnnnnnnnnnnnnnnnnnnnnnnnnnnnnnnnnnnnnnnnnnnnnnnnnnnnnnnnnnnnnnnnnnnnnnnnnnnnnnnnnnnnnnnnnnnnnnnnnnnnnnnnnnnnnnnnnnnnnnnnnnnnnnnnnnnnnnnnnnnnnnnnnnnnnnnnnnnnnnnnnnnnnnnnnnnnnnnnnnnnnnnnnnnnnnnnnnnnnnnnnnnnnnnnnnnnnnnnnnnnnnnnnnnnnnnnnnnnnnnnnnnnnnnnnnnnnnnnnnnnnnnnnnnnnnnnnnnnnnnnnnnnnnnnnnnnnnnnnnnnnnnnnnnnnnnnnnnnnnnnnnnnnnnnnnnnnnnnnnnnnnnnnnnnnnnnnnnnnnnnnnnnnnnnnnnnnnnnnnnnnnnnnnnnnnnnnnnnnnnnnnnnnnnnnnnnnnnnnnnnnnnnnnnnnnnnnnnnnnnnnnnnnnnnnnnnnnnnnnnnnnnnnnnnnnnnnnnnnnnnnnnnnnnnnnnnnnnnnnnnnnnnnnnnnnnnnnnnnnnnnnnnnnnnnnnnnnnnnnnnnnnnnnnnnnnnnnnnnnnnnnnnnnnnnnnnnnnnnnnnnnnnnnnnnnnnnnnnnnnnnnnnnnnnnnnnnnnnnnnnnnnnnnnnnnnnnnnnnnnnnnnnnnnnnnnnnnnnnnnnnnnnnnnnnnnnnnnnnnnnnnnnnnnnnnnnnnnnnnnnnnnnnnnnnnnnnnnnnnnnnnnnnnnnnnnnnnnnnnnnnnnnnnnnnnnnnnnnnnnnnnnnnnnnnnnnnnnnnnnnnnnnnnnnnnnnnnnnnnnnnnnnnnnnnnnnnnnnnnnnnnnnnnnnnnnnnnnnnnnnnnnnnnnnnnnnnnnnnnnnnnnnnnnnnnnnnnnnnnnnnnnnnnnnnnnnnnnnnnnnnnnnnnnnnnnnnnnnnnnnnnnnnnnnnnnnnnnnnnnnnnnnnnnnnnnnnnnnnnnnnnnnnnnnnnnnnnnnnnnnnnnnnnnnnnnnnnnnnnnnnnnnnnnnnnnnnnnnnnnnnnnnnnnnnnnnnnnnnnnnnnnnnnnnnnnnnnnnnnnnnnnnnnnnnnnnnnnnnnnnnnnnnnnnnnnnnnnnnnnnnnnnnnnnnnnnnnnnnnnnnnnnnnnnnnnnnnnnnnnnnnnnnnnnnnnnnnnnnnnnnnnnnnnnnnnnnnnnnnnnnnnnnnnnnnnnnnnnnnnnnnnnnnnnnnnnnnnnnnnnnnnnnnnnnnnnnnnnnnnnnnnnnnnnnnnnnnnnnnnnnnnnnnnnnnnnnnnnnnnnnnnnnnnnnnnnnnnnnnnnnnnnnnnnnnnnnnnnnnnnnnnnnnnnnnnnnnnnnnnnnnnnnnnnnnnnnnnnnnnnnnnnnnnnnnnnnnnnnnnnnnnnnnnnnnnnnnnnnnnnnnnnnnnnnnnnnnnnnnnnnnnnnnnnnnnnnnnnnnnnnnnnnnnnnnnnnnnnnnnnnnnnnnnnnnnnnnnnnnnnnnnnnnnnnnnnnnnnnnnnnnnnnnnnnnnnnnnnnnnnnnnnnnnnnnnnnnnnnnnnnnnnnnnnnnnnnnnnnnnnnnnnnnnnnnnnnnnnnnnnnnnnnnnnnnnnnnnnnnnnnnnnnnnnnnnnnnnnnnnnnnnnnnnnnnnnnnnnnnnnnnnnnnnnnnnnnnnnnnnnnnnnnnnnnnnnnnnnnnnnnnnnnnnnnnnnnnnnnnnnnnnnnnnnnnnnnnnnnnnnnnnnnnnnnnnnnnnnnnnnnnnnnnnnnnnnnnnnnnnnnnnnnnnnnnnnnnnnnnnnnnnnnnnnnnnnnnnnnnnnnnnnnnnnnnnnnnnnnnnnnnnnnnnnnnnnnnnnnnnnnnnnnnnnngatctgttggtggttccctcggctttggacctagtcgctctgattcagccctctctctccccgctgttttgttagactgatctttcacagtcggattacaccactgacatccccactgaaaaccggaaggggctctggtcagggtccatgatctgacctcctctggcctcaaccctgggcatcctcatcaccgtgtccctctgttcacactcctcacattgccttgttgggtttggactcagaaaggtgagagcttttcaggagagaaacagactcaaaatgtgaatctgagagagctctattttgagctatgatatgaagcagaattgattccatcttcagggtagagcatgagggtggcagtgaatagaggggctgagccgccgcacactccccctggcctatagaaagggaaggcagagttgctgaggggttcggagttgcttggtgaagggagagcctggaaaaggagcagaaaacaagaccaagaggctgaggactgagtagaggccccgagagccagtgtccagatgtctgggctccttgaagaaagcagaaccagtagcattgtggtgctagaagccatattgaaggaaggctagggatgacaagcacggagggagggccccacgaggtatgcagtggcagcaggtaggagtgaaatgacacagtgtcagggcaaagctgcgtggacagagggcggaggggctgtccaggagtgagtcaaagcagaggggcttccacagagtgctgtggaggggagaggcttcgtggactttgtggggacagcatttgtatctgggtacctctggaggatttctgatctaatttgcgatgaagagaatgcttatatgtctttgttttaaatatacacaaataattcagtatacatgactaatggcatatgtacatatatttaaagtaagggacgtaagtattgctttgtcccacattgtgttatcacaataaacaaaaacatatttgctgacacaaactctaatatttaaaacgtattctccataaactgaacttcccagaaaaccaaaccaaaaggtaattcttgaaaaggtaattctttcaggccataagtatgtgataatctgcatggccaaaggaagcagagtagccaatgagagccctaatagttattattacatttgtacttgttttacatgtattatacaatgtgctgtataaaactctttgagatggatgtactttgtattatattgacaaggaaacaggctcagagaatgtgaaagatttacttgccaaggccagtcagttaggcagtaccccatttggcattcatatcctggcccctgactataaaccctctacctcagcttgtgtgttttctcctgtgccatgccgaatttataaattaaacctacgtttaatttgaaacgtaaaaattatgtgttgccttcattttaatagatgaggaattctgagaattctgtttgccagtggtatttctgttatggttactgacatctgcttattttaatgtattttgacatgtgtggaagtgggactaatctggttgtgattcaggctctgcatatgtatcagagctgacccatctgccatgcaagtatattttagaaaaggagcaaattcctggctgggccaagtaacaccttttccacttctcctctgtgtgtgatctgttgtctacagtatcatgttgaaaaagttgagaagcgattttggaaagagagaagtgaggaatctgttgccagagtgtaattgagaaacagatgagctaatggaagaagccaagatgttacattccattataagggagttgtaatttactgtgaaggttgagggaatagcatctttttggaaagaaaaaagtcagaaatataaaatagcctactatataaagttttatgactccatctcataatcatttaaatgggtagatactttatgttcctataccttcaaaatccagcttgaaaccaccttccagagggcctttccagatttcacgtcctcaagtctgatcattccttcttctgtatcccatggtgaatattacaaatagagtcatagttgtaccttctgaaactgtttcattgtaaaatcccttgctgggtgtggtagctcatgcttgtaatcccagcactttgagagggcgatgcaggtggatcacctgaggtcaggagttcgagaccagcctggccaacatggtgaaaccctgtctctactaaaaatacaaaaattagctgggtgtggtggcgagcgcctgtagtcccagctactcaggaggctgaggcaggagaatcgcttgaacctgggatgtggaggttgcagtgagccaagatcacaccactgcactccagcctggggacagagggagacttggtctcaaaaaaaaaaaaaaaaaaaagaaaaaaaaagaaaaatccctaactaggtaagaaagtaaggacttggtaagagagcagttgtgtttcttttttgtcttccacagaatacagtgagggagctttgtgtcccctcttcagacaatgctgccgagccagcgtgctgaacctgccctggctggggatggtgccgtgggagggtgcgcttcagcttggagtacactcatgagagttagtctgcagggagtgggccggcctgtttattaccattgttgttgagctcccagcactcgggtgggtcagaatgcagggagtggaccagccccatttgttatagttgtcaggctcaggagtgagcaagacagagttctttccctatggaacttatattcaggtgaggagacttgatagtaaacaaatataatggcatatatcatatagtaatgcaaataaaaatggagtggcatgaggagcaggctagagagtgttgggcggagctgctcttttgggtatttgagtggatacctgaaggaagcgaaggacagcctgtgctgagatctttgagcagagcatcacaggccaagggtggcaggggaagggtctgaggcagctatgggcaaaggagtattgtaggagtgactaaaggccagtgtcgctggagaggataagaagggaatgttaggagtcggggccagaggaacagctggtgctgggaatcatcatagtgtagaaggtatttgtagccatggtaggggactgcattgctgagggagtgatatagggctgaggatgaagctgtggggccagcattttcagtgcagatgaagatgatgagggagcacagaacagccaggtgaggtcggaggaaagccgggaagatgcagtgtcctccagggctaaatggaaacagtgtttccacatgcagctggggactgtcctgtgctactgagctgggcaggtaagcctacaggcgggcgggtgagagggcccagctgtgtgagtggggcttgggggagccacttggtctcttcaccatcattagtggctcataaatgaagctcacagtagccagcatgacttttattttttattttatttatttttttgagacggagtctcactctgttgcccaggctggagtgcagtggtgcgatctcggctcactgcaacctccacctcctgggttgaagtgattctgctgcctcagcctcctgagtagttaggactataggcatgtgtcaccatgcccagcaaatttttttgtatttttagtagagacagggtttcagcatgttggccaggctggtctcgaactcctgacctcctggcctcccaaagcgctgggattacaggcatgagtcaccacacctggccaccaacgtgacttttaagacactctcagtcttagaatcctgattgggaggtggcgtcagaatctcagatggtaacactgatgtttgtgtgtggctcacagattgaaggtaattctaggaggagttccaaaaatgttctgaacaatgacagtattttgaggatgaagacataacacctcatcacacacacagctgagtgccttgaaggggagagcaaactttgggtttctgtgagttctggtactctggtgaaagggtagtgccctggagacctcctgggctgtttccatttcagatgttggtcatagggcaggactctgtggaagggataggcagttttcacagcaagggaggaacagctgccagcccacactctcttctgccatattgaattattgagggagagaccagttttcttctggatggtttttttttgtttagcagattcttgatgaatatttgattttggtggagagaagttttcttctgtggaggacttttcagtttattattacttgttctcttcattctccttagttccacacaatggcagctacctattctttttttttttttttttttttgagaagtttggctggaattctttttgtaatctctaaattgttttttaagaattagctagataatttttctccagggaagggattcttttgttttacataagcatatcttaatagatatgattttaacaatcaaattatgttctaattgtaacttaacggatcttatggtcagtacttttgtcgatttgccttgaaattgatctgtttttatcaaaggccctttttatagtttaaatgttctccaagaacaggctgaaagcacacctgccctcccatttcccatgcttgtgtgtcaaggattgttgtcaatttccacaggcatgttgcctttttgtgttagtttcactgtttgtcagcccttttagataagacagggcaaggcattgaaccctccagaactcgttcccctcattgcagatggcagcagtaagaccactgcacttgggtgagggtcactcataaaaagggcagaagtaaacatcacctatgaaagtattgttcttatatgatagcactaaatgtactcaaattgctactttaatacaaaggttcctatggcaatattaaatgtgaatctgatctgttttaatgtttaaagctcaataactctccttggttagagaatcagataattagttttggttggtgatatggtttggccctgtgtcccccccccctccccatatctcatcttgtagctcccataattcccatgtgttgtgggagggaaccggtgggagattattgaatcatggggatgaatctttcctgtgctgttctcatgatagtgaataagtctcacgaggtctgacggttttaaaaatgggagtttccctgcacaagatctctctttgcctgctgccattcatgtaagatgtgacttgctcctccttacctcctgccatgattgtgaggccttcccacccatgtggaactgtaagtctattaaacctctttttcttcccagtcttggatatgtctttatcagcagcgtgaaaatggactaatacagtaaattggtaccaggagtgggttgtgcggaaaagatacccaaaaatgtggaagtgactttggaactgggttacaggcagatgttggaacagtttggagggctcagaagaagagaggaaaatgagggaaagtgtggaacttcctagagacttggtgaatggctttgaccaaaatgctgataatgatatggacaataaagtccaggctgaggtggtctcagacagagatgaagaacttgttgggaactggagcaaaggtgactcttgtcatgttatgttttagtaaagagactggtggcattttgcccctgccttagaggtctgtggaactttgaacttgagagagatgatttagggtaactggtggaagaaatttctaagcagcaaagaattcaagagataacctgggtgctgttaaaggcattcagttttgtttttttttttttttgtcagtaaatactttattcatttctctgttgattttttttcctcattacaaaacagcactgtatacagctgtgcattttctggttacatggaagtggaattatttggtaaatgtgcatattcaacatgaataaaaatgaacaatttgctttccagggtagtattttaaatttatactcccatattccaccagcagtgcttgagagttattgtttatcagcatttcctaatgtgaaatcggagtttttctaaatgagatttttggctatttggagattttcccactttccttggaatggtctattcagattctctacagtttttattttatgagatttgatttgtaaatattctttatatatttgagttttaactttttgtcagtatgtgacaaatatattctgtcaccttgtgggtttgtttttaactgttcgtgatatctttggatgtgcaaaattttaataatgttggatttatattttttatagtttttgaatgctgccttttcataaaggagttatctgacttccactttccccaggagctgcaggcatcaatttggcaagtttacttagcgctggtgtacttggtgacggccttggtgccctcggacacggcgtgcttggccaactccccgggcagcagcaggcgcacggccgtctggatctccctggaggtgatggtcgagcgcttgttgtaatgcggcaggcgggaagcctcacctgcgatgcgttcgaagatgtcgttgacgaaggagttcatgattcccatggccttagaggagatgccggtgtcggggtggacctgcttcagcaccttgtacacgtatacggagtagctctccttgcggctgcgcttgcgcttcctgccgtccttcttctgcgccttagtcacggctttcttcgagcccttcttgggcgcgggagcggacttcgctggctccggcatgttgaaggcgaactacgagcctgagacgagcagcagatcgtgaaaacgggaagtaatgcaaggcattcagttttataagggaagtggtttggaaaatttgcagcctgacaatgcgattgaaaagaaaatcctgttttctgaggagaaattcagactggctaaagaaatttgcataagtaacaaggagctgaatgttaagccctaagacagtggagaaaatgtctccagccatgtcacagacttttgtggcagcccatcccatcataggcctagaggcctaggaggaaaaagtggtttcatgggccaggcccagggtccctgtgctttgtgcagcctagggacttggtgccctgtgtccctgtcactccaaccatggctgaaaggggccaacatagtgctcaggtcctgcttcagaaggtgcaagcctcaagccttgggagcttccatgtggtattgagcctgtcagtgcacagaagtcaaaaattgggttttgggaacctctgccaagagtttagaggatgtatggaaatgcctggttgtctaggcagaagtttactgcagggatggggctctcatggagaacctctgctagggcagtgcagaaaggaaatgtggggttggagcccccacacagagtccctactggggcaccacctaggggagctgtgagaagagggccaccgtcctccagaccccagaatggtagatccgctgacagcttgcaccgtgcacctggaaaagccgaagaccctcaatgccagcccatgaaagcagccaggagaggggctataccttgcaaagccacaggggtggagctacccaaggccatgggagcccacctcttacatcagcgtgacctggatgtgagacatggaatcaaaggagattgttttggaactttaagatttgactgccctgctggattttggactcgcatggggcctgtagcccctctgttttggccaatttctcccattcagaatggctatatttacccaattcctgtatccccattgtatctaggaagtaactaccttacttttgattttataggctcataggcagaagggacttgccttgtctcagatgagagtttggattgtgacttttgagttaatgctgaatgagttaagactttaggggactgttgggaaggtattattggttttgaaatgtgaagacatgagatttgggaggggccaggggctgaatgatatggtttggctctgtgtccccactcaaatctcatcttgtagttcccacagttcccatgtgttctgggagggacctggtgggagataattgaatcatgggggtgaatctttcctgtgctgttctcgtgatagtgaataagtcttatgagatctgatggttttaaaaatggaaacttccatgcacaagctctctctttgcctgccgccatccatgtaagatgtgacttgttcctccttaccttccaccatgattgtgaggcctccctagccatgtgaaactgtaagtccattaaacctctttttcttcccagtcttagatatgtctttatcagcaacgtgaaaatggactaatacagttggtttataaaactagttttaaaaaattcaatgggatgtttttcttggcccatttaattttttcttctttactgcagagaagtaattgtagagatgtccttcatgttgtttccagagtaacacacattgacatttatatgtaagagctggtgggtactgtaatcatctgagagaaatgatcagatgtcggtgtagggcaagggcagctgccgtcagaagaaacaacaccatgaaaggccaaaaagatttatgaagaacttgacagaaataagagatttttaaaaatgctcgctggtcacttggaacaaatagcagtgtacaaggcatgatttgaatgactacttagattgtagttgagaacatctgtggctttcaggatattttaaaattacagtttgatgctcaaggcacctatttctttagcttaaaggaaaaggatctgcaaagagcagaggaaaaccaagtagattttattgcttggctgagtgtgctgcggcagatgacatgtagcttatttcgaagatatgtttggcattatttatttttagaatttacctgatatcagatcttagtctactagacagtgtgggagcacgcattgacagacagcctgggctggcacaccccatgaacatagtccctgatgcagggtatggacagcaactcctacttgactgggaaactccaggcatttcacgtgcattaggcctcactgtgatgcaggcacatctcaatgggtccagccaaccctgctcaccacagtggtatgtgttcaggtgcaatgtcagctgggagtgtacacagcactggtttggatctgtgagggttaccaccttgcatactgtgtgacagaacttgaaatttgccgagaaggcaagacttaaatgaactagattcagacagtacaaagtacttgatgaggtgatggtggtgatcgtgagcagttctcagtgcttcctctgtgttgagccctattgtgagcactttccatgcattaacttgccagccctgccaggtcagtgctgattcacccagggagcaagtggcagagcaggatgtgagcccaggccatgaggatcctggtagagccaggaatcggagtggatgtgtcagtaagggttagggtgggtaggcagaagttgctgaaccctattgccgagttcatgggtctgggagaacacgagttcagttgaccaggagatatgggaaggactttggcaaatgtttctttttctttctcttttcttctctctgtcctccccttccatcatccttctcttcctttattcttcccttcattctgttctcaggcttttttatatataatattttatatatttatggggtgatatgtgatattttattgcacacatagaatatatactgatcaggctgatcaagtcagggtatttggagtatccatcaccttgagtattatttatatgtattgagaacatttcacatacttctagctactttgaaatacagtatacattgttgttaactatcatcaccctactctactctcaaacattagtacttacaccttctatctgactgtgtttgtattgaccaacctctctcatccccacttcaacccacagacccttcccagcctctgctatcagtcactctactctcaaccttcatgagatccactttttagtttccacatatgagtgagaacatgcaaaatttgtctttctgtgtctggcttatttcgcttaatgacctgcagttctatccatgttgctgcaaatgacataatttcattcttttctaagcctgaacagtattccactgtgtatatataccacattttctttatccattcacctgttgacagacatttgtaggttgattttgtctcttgtctattaggaacagtgctgcaataaacatgggggtatccctttgatatattgattacttttcctttggataaatatccagaagtggaattgctagatcacgtggtagttctatttctagtttcttgagaaatctccatactgttttctgtagtggctattctaatttacatgcctatcaacaatgtgtaaaagttcccttttctccacatcctcgccagcatctgttttttgtctttttagtgatagccattctaactgggtaagatgatatctcattgtgatttcagtttgcatttccctgatgattagtggtttttttttgtatacttattgaccatttgtatggcttattttgaggaatatctgttcaaatcttttgctcactttttaatgggattatttgttcttttatttgagttgtttgagttccttttagatagatccccttgtcagaggaatagtttgcaaatagtttctcccattcagcacattgtctcttcattctgttgtttcttttgctgtgcagaaggtttttagttcaatatagtctcatttgtctatttttgtttgttgtctgtgctttcaaggtcttagctataaaatatttgcctgtaccaaatgtcctgaagtgtattccctatattttcttctagtagtttttagttttgggtctaacatttaagcttcaatccatcttgagttgctttttaaatatttggtgagagatagggatcgaatttcattcttctgcatatggatatccaattttcccagcaccatttatcaaagagactgtccttcccccaaggtatattcttgcacctctgttgtaaatacgtggatttatttctagattctggattctgttccattggtgtgtgtgtctgtttttataccagtaccatgctgtttcggttactaaagctttgtaatctgttttgaagtcaggtaatatgatgcctcttgcttttttctttttcttttcttttttctttttttttgctcacaattgcattggctatttggattcttttggttccatgcaaattttaagattttttttcaatttctgtgaaaaatgacattggtattttgatagagattgcgttgaatctgtagatggctttgggcagtatgattattttgaggctattaattcttccagtctttgaacatgggatgtctttttgtttatgtcctgtttaatttctttcttctgtgttttgtcattttccttgtagagatctttcgcctcctaggataaatttattcctaggtattttaattttttggtagctgttgtaaatgcgacttcattctttatttctttctcagcttgttcattgttggtgtatagaaacactgttgatttttgtatattgattttgtatcctgcagcttcactggatttatcagttctaacagttttttggtggactctagatttttctaggtagaagatcatatctttagcaaagaaggacagtttgacttcttcttttccaattttgctgccttttatttatttatcttgtctgattgctctggctaggtcttccagtactatgttggataggagtggtgaaagtgggcatcttgtcttgttgcagttcttggctgaaaggatttcagcatttctcatttagtatgatgttagctgtggatttgtcacacgtggcctttattttgttgaggtatattccttctatccttagtttttttaaggtttttatcataaaaggatgttgaattttaccaaatgcttttttagcatctgttgaatgatcatatggttttgtcgtttgttctgttgatgtaatgtatcatgtttattgatttgcatatgttgaaccatccttgaatccctgggataagttaagttccatttgataatgatgtgttatttttctgatgtgccgttggatttagtttgctagtattttgctgagaatttctaagtctatattcattaggaatgttagcctataattgtcttttcttttctttttttttttgtgttgttgttgtttgagatggagtcttgctctgtcacccaggctggagtgtagtggcgtgatctcggctcactgcaacctctgcctcccaggttcaagcaattcttctgcctcagccttccaagtagctgggattacagatgcatgccaccatgcctggctaatttttgtatttttagtagagacggggtttcaccatgttggccaggctggtcttgaattcctgacctcatgatccacccacctcggcctcccaaagtgttgggattacaggtgtgagccactgcacctggcctagcatatacttttctttttttgttgcatccgtgtctggttttactatcaggataatgctgacttcatagagtgatttagggagaatccctttctcttcaattttttggaatagttttaggagaattggtgttaattctttgaaagtttggtagaagtttggtagtgaagccatccagtcttggacttcactgggagactttttattactgattcaatttcatttcttgttattgctctgttcaggtattctatttcttcctgattcaatctagtagattgtatgtgtgtaggaatttatccatttcctctaggttttctaggtagttagtgtatagttgttcataatagtctctggtgatcttttgtatttccatggtatcagttgtaatgtctcctttttaatttctgattttgtttgtgtcttctcttggttagtctaggaagtgctttatcaattttatcttgtcaaaaaaacaactttttatttcgttgatcctttgtggttttttttttctctgatctttattacttgtttctttctactaattttgggtttggttggtttttgtttttccagtacctcgaggtgcactgctagattatttatttgaaatcattctactttttctgatgtaggcatttgttactataaacttccatcttagcattgcttttgctgtatcccatttggttttggtatgtttttcagttttcatttgttttcaagactttttaaaaatttcctccttaatttctttcttggctcagtggtcagtcaggagcatattgtttaattttcatgcattcgtagtttccaaagttcctcttgttattgattttgagttacattccactgtggcctgaaaagatacttgaatgattttgatttttaaaaatttgttgttgcttgttttgtgtcctaacatgtggtctatcttggagaatgttctgtgtgctaatgagaagaatgtgtgttctgtaactgttgtatgaaatagttctgtaacgtctgctaggcttatttggtctaatgtgcagtttcaatccaatatttctttgttaattttttgtctgagtgatccaatgccgagagtggggtgttgaagtcttcaactattattgtattgcattctgtctctccctttagatctaatagtacttgctttatctagtgctctggtgttgggtgctctggcgttgggtgcatatatgtttggaattgttatatccttttgctgaattgatacttttatcattatataatgaccttcttttgtctctttttacagtttttgacttaaaatctgttttatctgacataaataaagctacccctgcttgctttttgtttccatttgcatgggatatcttttcttgtccctttattttagtctatatgtgtctttacaggtgagatgaattttgtgtaggcagcatgtagttgggtcatgttttttttttttttttttttaattcattgagccagtctgtatcttttgagtggaaaatttaatccatttacattcaaggctattattgatatgtgaggtttacctctgtcattttattacttgatttctgattgttttgtatatcctttgtttcattctttctctcttgttgtttattattgtggtttggtggtgatctgtagtggtaacatttaagttttttctttttttctgtgtttgctctaccagtggtttttatattttcatatgttttcatgattatagttactgttctttcacttctgggtgtaggacttccttaagcattttttacaggactggtctagtggtgatgaattccctcagcttttgcttgtccaagaaatacttcatctgtcctttatttataaaggatacttttgctgcaaatagtatccttgaatggcagttttttttctctttcagcactttgaatgtatcatcacattctctcctggcttgtaaggtttctgctgagaaatccgttagtctgatgagggttcctttgtgggtgactagatgcttttcttttgctgtttctaaatttttctctttgtatttgacttttgacagtttgactgtaatgtactgtggagaggatctttttgaattttatctatttggggatcattgagactcttgtatctagatgtctaaatctctttctagacttgggaagttttcatctattgttaaataagtttctgtttgctttttctttaccttctgggacaccaaaaatttgaatatttgatttatgatgtcctatatgttacaaagcctttgctgattctttttaattctttttttttttttttttaatctttgtctctctgggttatttcaaatggtctgccttcaagttttgagatttttttcctttggcttctctagttattattgaagcttttgaatttgttttgtatttcattcaatgaatttttcagttacagaatttctgtttggctcttctttatgatacctggtaaggttcggctatgtctgcacccaaatctcatcttcaattgtagttcccataatccttacatgtcttgggcgggacctggtgggaggtaattgaatcgtgggggcagtgacccccatgctgttctcgtgatagtgagtgagtcctcacaagatctgatgtttttatgaggggcttttccccctttgctgagcacttcttcctgcctctgtgtgaagaagaatgtgtttgcttcaccttctgccatgattgtaagtttcttgaggcctcctcagccatgctgaactatgagtcaattaaacctctttcagttaaacctctttcctttataaatcacccagtcttgggtatgtctttattagcagcgtgagaaaggaccaatacaatatccatctcttggatcaaatttctcattcttatcctgaattgctttttaaattcctttgtatttttcagcattctcctgtatgctattgaacttccttactatcaatattttgaattattttcctggtattccataaatttctttttgattggaatctgttgctggagaattgttttctttaggagatgtcatattttcttgctttttcatgtttcctgtacccttgcattagtatctctgtggtataatggtcatttcttctaagttttttgaatttactttcgtaggagaggacattttcccgaagatgtatctgtggtattggtaggtagggcactttggttttgaatctgggtgtgtgcagtagtgtagtctctgtatgatttctttggctgtaaacagcattaatgatatctatgattttcttaatggcttagggtatggttgttagtggaggctgtggtgaaattttgctgttgacctgggtgccaggtaggccagtcttttggccccagtggtggcagtggtggactgagcatgcctgtcctcaggccccagggtggtgtacactggcaccagtgttagtaggtccaggcaggccagttcttgggcctccaggtggcttctttgggtactaggaatggcagtggtgggttgggtgggtgggtgggttcctgagcccctgagcagcaggtgtggtgtggttgatggcaacagcagttgtggtgtgggtgatggcaacagcagtggtgggacagccctttggggtcttcatctctggtagcttatgctgggctgttttccaaagtgctgatgtttgtgacggctgtgacaggttgggtgggctggtccttggacctgcaggtggcacatatgggtgggtcgcagcggtggtggtagcagcaagctgagtgggcctgacccactctgggagactctgctgagatgctactggtgatccccaggcccctggacagtgtgatctggttctagggagggatggtggaggcaggctggctggacctgccctcaggtcccttggtggggagtgtagttattggctgtggtaagtagcatcgaggtgattcctaggcctcccgtggaatgctcaggtaggggtggccagagtttcattgtgtccctgctactggggagggcagggtttctttccctgggagcagctgtagtcaggcacctagggggcatgggctttgattgcacctcacctcaggcctgcagcagctcatagtggtagcagttgcaggtagtcgactttgaccttggagctcatgaaaatacatggctacccatctgcagggatggtgtgggggatcactccctgtggctcccacctccaccctggtggcggggcaggctgcagttcattgggggttgtactctccaagtggtgccatgccacagcagcttaggatttggggggttgtggcacccagcgtgggctctctgtggagcagtgcctttgtacagtcttcaggcagctctccgcagtagtcttggggtcctctagaattgaaggactctcccagggctgtggattgtagaagtccacagcagcaatgtgaactgctgggaagggtctttcacttaccctttcccccaattagggagccactgctgactcccagttgatcccagcctagcaagctgccttggttttctttccttccttgcttttggtgtttctgaatgtttctttgttgaattccaaagttctctcttaggttatctatttgaagtgtgattacttgctattttggttcttctctgtggaagaggtgagcaccagatctgtctagtcagccatcttgaagcctcaaaacccttttttttttttttttggacacagagtatcactctgttgctcaggctagagtgcagtggtgcaatctcagctcactgcaaccccctcctctcaggttcaagcgattcttctgcctcagcctccccagtagctgggattacaggcgtgtgccaccacgcccaactaatttttgtgtttttactagagacaaggttttgccatggtggccaggctggtctcgaactcctgacttcaagtgaaacacctgcctcggcctcccaaagtcctgggattacagacataagccaccatgcctggtctcaaaacatttttaatgagaagcacagcatacctagagaaaagtacagaaacataaaagtgaagctcagagaataattacaaaggaacatttgttcaccaccacccagggtgagaaatggcatgttgcctgcacccaggaaatgcgtgtgcttcttcctcatcactacccactcccattttcccatttttgaacattatataaatgaaaccatactttgatgttggctttttcattgagcactttgctagtgaggtccatcgtgctgttgcatgtagctgtggttcattttcactgccacctcgtagggtttctcagcactgctgacgtttcaggcttaatgatgctctgctgtggggctgccctgttcactgtagggattttagcagtcttcctggtctttacccaccagataccaatagtgtctcccacttgtgacaatcaaaaatgtttccagatgttcagattgccctctgggatggcaaaatgcccctcgccctggttgagaaccactgctctatagtacaggttgaatatcccttatttgaaatgcttgggacaggaagtgtttcagatttcagattgttttggattttggaatatttgcatatccataatgagataccttggggataggacccaagtctaaacatgttcatatgtatttcatatacctgtgatagacatagcccgaaggtaattttatatagtacttttagtaattttgtacatgaaacaaaatttgtgtatgttgaaccatcagaaagtaaaggtgtcactctctgagccgcccatgtagacattctgtggttgtttgcatcaccatcattcctgactctgaatttataagtggctgacaagcagtcattttctctcacttatgcacacctaagtatttaacagtatttactggccctccatggggcaatgtggggaacctgcccttggtgcactggcctgcacacacaccattttattacctttgtgggtgtgcttgcattggggaatccgggcctgcatggaaaagacatcgcagccaaagggacctgaacggtctcttttcccttggtgactctgaataaactgtgtgttgtgtgcctgccttttgattgtaacctgtcgtgtgaagtcaggtgtggaatttttcacttgtgtcatcatgttggcactcaaaaagtttccaactttggagcactttgggttttggattttcagattgatgatgctcaacctgtattctattgtatgaatttaccagtttagttatccattttactattgatgcacatttggattatttctagttattggcctttacaaatagtacttctctaacattcttgtacttgtcgtttggtaaaggacatgtgcatgttttcctgttgcgtttatctttaggaatggaagtttgggatctatagaagtgcatgtcttcacctctagtagtttatgctgggctgttttgcaaagtggttatatcaggtgtgaacatttaccaacagcaaaggagcgttctggttgcttttctttcttggaaacacctggtattgtcagagatcttcattgtagccattctgtggggatggagggctggctcattgtggttttaatttgcattgtttttatgagttctgaagtggagcaccttttcctgtgtttactggccatttggatatccatttttgtcacaacctattcagagctcttgcctttttttcttttaggttgtctgaatttgtatattctggatacagaatcttttttgattttattaaagttgcgcatttattttaccactccatgtcttgctttatttctcttaatggtatgttttgatgaacagaagttcctgatttgaatgtactctgagtgcttaatgtatcctgttaagaaaatgtctgcttacctcaaggtcatgaatatatctgcctatattttctcctcggtttctctttttgccttttgcatttatctttgggcatgctctgtgataggggtcaagttaagcgttccccagggttctcacagacccagcactgactgcggagggcactgtgctttccccactctcctcggtgcccacacgtgtgtggggtctgtgtctgtgctctccattgcactcggccagtctcccatcctgcagtgctacattgcctcttgtcaagatggataagtttttgatacctagaacgaacattgtttttcttcaaaaaatgccttcactattattgtctcctttccatataaattttagaatctgcctgtcaaattccacaaaggacaccgtgttgattttgatggaaatttcatggaatctgtagatcagtttggaagaattgacgtttttagagtgttgagacctccagtacatgacatgatacatttcttcactgcttagggccgtctttctctcaacagggtattgtagttttctgaatggaggtcttcaatatctttaatcagatttacacttagtagtagtcctccttctttctaattacataattagaaacagtgtctatcactaaacatcactaattcactcaccactacgtgccaggtcctgttctaggcactgaggccacagcagcaagccagacagccccaagtccttgccttcatggagctagccagtgaggagagacagcagcgccagtaaagcagcgcagggcactgtggactctgtgatatttaatgccatggagggtaaagggcgggagacctgagaggggtagcttttgtgttttaattttagagtggtcatggaagaccactgagcggttgacatccacacgaagatctgaaagaagagggaagtgagctcttttttttaaggcaattttataactttatttgatgtatttgatgatcagctgttagttctcatccacattgactgtctatagatttttgaaagcagtaacgggtacataagtaatcaaagtatagagtttatttggtgaatcttcattctctttacattttctggacaaccgcacacggatgcggtatgggatattccttattcctttggtccagacagctttgttgagcctggtatcaatgcacatatctggagttcccatctccttcatggcaaatttccaaatctctttgagtgcctgaggggcacgcttcttgaaggccactctgtggatgtgctgtgaatgttgatggcgtatctcaggtcaccaccttgttgatggtagaacggccctttttcttctcgccaccctttgtaggagccattctgccaggcccaagttggaaaggaagcgaagcaagctcttagggtgtctgggaaggcacgttccagccagagggatcaacatgtacaagcgcccgaggtggggtgtgttagcagagccagaggcccatgtggcaggcatggggtgttggaggagagcatgggggtggggtgaggctttagtttgtgtaatttggaaattactgtttatggaatgcctactatctaccaagtgtgatagacagttttgctggtatctcctcctttatttagtctttataatagtggtgtagagaatttaaaaccagtttatagatgagaaaacaaaggcctagcaaggtgacatggctttgccgaggggctgctggtgagtgactccagagtctgtgtttgcgcctccacatggtgctgcacactcagtgtgcctcatgtgttattatagtttatgcatttaatgtgtgagttttagaaaaacagacaattagcagataagtaaagatagatttgtttattgtcatttgaaggtgtggttgacaatagggccctgtgagcatgtgcctgaggagcccaccagcaagtaccaaggagccagcatagctgtcagggtgtcctccaggccgagtttggtgagttttctttgtgttagcatgagtgcccatgtctgagaaatgtggcactgggaaatcaatgcctgcgacaagagctatcacaagggcatgtggagctagggtgtctcagtgccatctccttgttctcagttagctgtgacttaactctgagtgccattttgtttttccctcccttccccttcccactgggtgtgagcgtgggacatatgaaaaccctcttaccattgtggggaactagtgtcctgagggacccagtttgggaaacattgagctaccttgatgttgacagtgagtgtgacatggagaataggaaggggcggtgaagagaagtatgggcaaggagggagtttgtagaccttgcttcctatcagacagatgcccgtgcctggtggagccttctttctaaggaacctaagtcagcgtgcaccagctttaggataagatgtttcagtttggctgtgtgtataaagaaatgggattttaaagttcctcatcattttattgaagcatggttacatctttacctctcattctgagttttctccccaaatccctgcagagagtagggaagaatgttgcctgccagtaatgataaccagtcattgcccagcagtacatcctctgtccagtggctgggcctgcagtggatgcctgtgaattgaactggcacagctggtagactcagttgcttctcagctgttcagcgtggattggtgcagttatttaagcctagccacaggcacagttcctgccagatgctgctgctgctgatagatgtgactgagtggccgtatgcttaccagaagcatttgtccatggcagagacctgtgacttgagaccttccagctggaggccatcagccaggggagctttccgagtgcctggttgagattgtttcagtgttcagagttgttggtggccctcttgttacgctggctgctccaggtcaccagcgtagattctctgccccatactccttcccactcacaaatggtttaatgagcgagcacattaacaaaaaaaatctgtctactgttgggaggaaacgtggtgagatacaggcagggttttcatgtccatccaagctcttgatagaactttgtgaggagaaaatagccccagaatgtcaagaggggactaaactgagaaactgtagaagaaaccaagcagaatgtaattttatttattttcatttgccagagctttaatagtgaaatagtgctttattggggtttgttttctgtgtggctccattcctgtgattttcaagaataagcagaactaatctagggtggtagaaaccagagcatcagtcacttatgggttgggctgcctagaagggacaggagggcatgagggagcttcatggcagggggagagacacactgtatcttgacagagcgatgttttttgtggtgcatgcatttctgttagaccttaattttactcataagatttatgcagtttaccctatgtaaattttaaccttattttgacatccagattttttttttttgagacagccttgctctgtcacccaggctggagtgcagtggcatgatctcagctcactgcaacctccacctcccaggttccagcaattctcccacctcagcctccagagtagctgggactacaggtgcccagctaatttttgtatttttggtagagatgggtttcaccatgttggccaggctggtctcaaactcctgacctcaggtgatctgcccacctcagcctcccaaagtgctgtgattacaggagtgagctaccatgcctggccccactttatagaaaagttggaaaaatagtagcaagtaactctcacccagcttcccctaatgttagcatcttacataaccatagaacagttaccaaaaccacaaaattaacattggtatgatatttttagataatctttagctcttgttagaatttttctatttttctcacatcatttttctaaaaatggctttattgagatataatttgcatgctgtaaagttcattcataatacacaattcagtggtttttagtatgttcacagagttgtgcaagcattaccattgtctaattttagaatattttcattgccaccaatagaaacccccatacctattagcagtgactccatccctggcaatgactaatctgctttctgtcactatggatttgcctattatgaacattttataaaattagtgttgtacagtatgtggctttttgtgtctggcttagtgtgttttcagaattcatctatgttgtatcatgtgtcagtacaccattcatttttatgacctaatatcccattatgtgtatatacgacattttgttcgcccattcatcatttgatggacgttgggttatttccactttttggatgttatgaatcatgctgctagattaacattcctatacaagattttgtgtggtctagccattcttgtagagtagtgtgatagtctgtttttttttttgttgttgtttttttttgctcaggattgcttcagctatttggagtcttttgtacttccattatgaatttcaggattgttttttctgttttttttttttttttgtgaagaatgtcattggtattttggcaaggattgcattgattctgtagattgcttttggtagtatggtcatttttacaatatttattgttctagtttatgaacatgggatgtctttccatttgtttgtgtcttcagtttctttcatcggtgttttatagtttttctttttgagatcttttacttcatgtttaaatttggttaaatttattcctaaatattttttgtagctattgtaaatgggattgcctcactgatttatttttgagattgtgttattggtgtatagaaatgctgctgaattttgcatgttgatttttgtgttcagcaactttctttattgaattcatttattttaacaatttttggtggaccttttagagttttctgtgtatacaataatgttgtctgtaaacagggacaatttgacttcctcttttccaatttggatgccctttatttatttttttcttgcctaattgctctagctgggacttacagtactatcttgaataggagtggtgatggtgggaatctttgtcttattccagatcttagaagaaaagctttcagcttttccctgttcattatgatgttggctatgggtttgtcatatatggcctctattgtgttgcttctgtacctaagttattaagagtttttgtcataaagcgatgccagatggtattaaatgctttttctttatctgttgagatgaccatatggtttttgcacttaattctattaatatgttgtataatatctgttgatttgcatgtggtgaaccatgcttgcatctctggcataaatcttttttgatcatggtgaatgatctgtgtaatatgctgctgtatttggtttgctagtgttttgttgagaatttttgcatccgtgtttatcatggatgttggcctgttgtttttgttgttgtgtccttatctggttttggtatcaaggtaatgttggccttatagcataagtttggaagaagtccttcctcctcaattttctggaagagtttgagaagaattggtatcagttctttaaatgcatggtagaattctacagtgaagccatcccattctgggcttttctttaacagattgaatcttgttacttgtaactggtctcttcaggtttctgtgtcttctttgttcttcttggtcggttgtatgtgtctgggaagttatccatttcccctaggttttctaatttgttggaatagagttctttttaatagcctctcatgatcctttctatttatgtaatatcagttgttatgtctcctttttcatttctgattttattgatttgggtcttttctctttttcttggttcctctagctaatggtttttgatttttgtttaacttttcaaaaaaccaactttttgttttgttgatattttgtattgctttttactcttaattttgttttgtttttgagacatggtcttgttgtcactcaggctggagtgcagcggtacaatcactgcttacagcagccttgacctgctggggccaagcaatcctcccaccttagcctcctgagtagcttgcattataggcacacgctgccacacctgacaagtgggtgtttttgtttgtttggtagagacggggtctcgctttgttacccgggctcgtcttgaatacctgggctcaggtgagtctcccatcaccgctttccagagtgctgtgattacaggcatgagccatcacatctggccttaattttatttatttcttctctgatctttattatttctttccctgtactagtttggggtttggtttgttcttgcttttgtatttccttgaaatacattattagcttatttatttaaaatctttccacttttctgatgtagacatttattgctctaaatttccctcttagcactgcttttgctatatcctattggttttgatatattgtgttttgattttcatttgtttcaattaattttaaaattttcctcttgattttgttgttgactcattgattgttcaggagcaggttgtttaattcacacatacttgcccaattttgaaagttccttattgttgatttctagttttattccactgtggtcaaaaaagatacttgctataattttaattattttagatttgttgagacttgttttgtgtcctaacatggtccaccctggaaaaggttttgtgtgctgataagaagaaagtgtattctgtagctgttggatgaaatgttctgtaaacatctgttaggtccatttggtctaatgtgtggttaaagccaaagtttccttgttaattttatgtctaggtgatctgttccatgttgagagtggggtgtttaaatttttaactattatcatattggagtctatctctccctttagatctaataacatttgctttatatatctgggtgctgtagtgttgggtgcatatatgttcagaattgttatatcctcttgctgaattgatctttttaacattatataatgaccttctttatagtttttgacataaaatctattttaactgatataaataaagctacccctgcttgcttttggtgttcatttgtgtggaatatcttttctttatccctttgctttcagtctatatgtgtctttacaaatgacatgagttacatgtaggcaatatgtagtttgcttttcactggggtctgttactagagagttaatattttttcaaattaattcagctagtctatgtcttttaagtgggggaatctaatctgtttacatttaattttattagtgataggtaaggacttactcctgtcattttgttgttttgcagttgttttgtatagtctttgtttccttcttcctatcttgttttttatcattgaggtttagtgaggttttttaatgataaggcttgattcttttctctttctcccttgtgtatctgctgtaccagtatgttttatacttttgtgggtttttaagagagtgtttatcatcttttcacttccagatgtaggatttccttgagcatttcttgtaaggccagtctagtagtgacgaattcctttaagtttttgcttgtctgggaaagacgttatgtctccctcatttctgaaggataactttgctgggtataataatcttggctgccaattttattctgccatcattttgaatattacatcacattttcttctgggctgtaaggtttttgtggagaattttatgctagtctaatgaagattcctttgtatgtgacttgatgcttttatcttgctgcttttataattttatctttgtgtttgatttttgacaatttggctacagtgtgcctggggaataattttttttggttgaatctatttaaggacctttaaacttcctggacctggatgtccatatgtcttcccagacttttgaagtttttggctattatttaagtaggatttctatacctcttcccttatctctcttctccttctataattctcattatatgaaattcatttgcttaatagtgtcccataagtcttgcagactttcttcactctttttcattcttatttctttctttctcccctctgagtgggcagtttcaaatgacctgtcttcatattcagagattctttcttctgcttgatcaagtctgctgttgaagctctctattgtattttaaatgtaattcattgaattcttcagcttcaggatttgtttagttctttcttatgatttctgactttttgttgaatttcttgtttggatcatgaattccagattttgttgaattgtctatatgtattttcttgtgtctcattgagtttccttaagatcatttggaatttttctttttggcagttcactgattttctctttgatggggtcttctattcctagaaagttattatgttcctttggtggtgtcctatttccttgctttttgatgtttcttgtgtccctgcattgatgtctgtacatatggtggaataattgccttttccagattttctagcatggcttttgtagagagagacttttacctgaaattgggttttagtgtgccatttaggaaaggtgtagtgactgttgctggttaggtgcagtggtatagtctccatgaacctttttcagctgtgttcagtgttagcctcagtggcccaggctatagaagtttgttacagtggtggtgacagtgtaagttgttaatgtccttggtatcaagggcttttggggtcctcctggtctcattttccttgcaatggggagacttagctgaggggaattcctttgatgtctgctctgacatggcctacaagcagctgccatggtgctgggttccaggtgtaggtgcttgtaatggttgcagggctgggttgcgacccctattgtggcatgtgggtcttggggtacaggtttgctctcttatggcagggttggatttaggtggccctcagagccaggatctgtgactctgaggcaccctctagcagctcgggcccagggggccaggttgtaactgtgattctaccccagggggtggggcagggtacagcactggcggaactctgaggaagaaggggtgctctgggggcttgggcctggggagccagggtatggctgcagttccggaaccggagccaacagggctcagtggcagctccggtcccaggggatgtgacactgtgtaataatgactcaagaccctgggatggtggggcttgtaagtatcccagactctgtgaggccatgtgtggcaggagaacgtaccccagaatgacagagcacacctgtcactggggccctgaggagggtgggaagcagcgtatccatgactccactctgcagggagagaggtgtctcagcagctcagactggggtggggggctagttcagctctagggaagcaggcagttgagttgtttggcctgtaaggtgggatgtctgggctcagctactgctctgtttctctgggatgtagggcactgcatcagctcagccctgggatgtgcagctgctcagctcagccagggcactgattccccttgcggtggtgtgtcgcttccactcaggcctgagggacgggactgtcctgggtggcccaggcatttccctggatgcagagtgcttcttcaacttgggttccaggaggcatgactgctctgagcagccaaggtattgttttccctggaggccgtttatggctttagctccagcctgagggggcaagagcgggtagtggagtggccccacctttgcttggccccacagaggaggtgtaacagctgcctgcagcttggctgggggatgtggggccactgggctggggtggttgggcagcggcttagcttcaggggtgaaggggagctggggctgctaccccaggaacaagatacactccagcagtagttccagttccaagagggcaccgtgagggccacgggggcaggcacagtgtcgattccttctccggcgggagcacagtggtgtggcctccaggcagctcactccaccctgggcttcgtgcctgtgaggactgcaagggaccccaagggtgagggcggtgggtgtccacggtgttggtgggggctgctggggtcctcttgattacctcctcactgaagggaggtgttttcctgggttctagctgaccctggttaggggatggggtgccaggggcccggcatttccttctgttctttttgtgactatcatgaatttctgggctcgccagggtttctgttactcctctaatgcactttagcactctccctcagttgtttttgttaacatgtagttgtgtattcattgttctggctgtctctgtgagggggttgaatgctaggcacttctagctggctatcttgataatgttacccagaatgggtagtttctgtcgtcctatcttccaatttactgattttttttttttttttttgcctctgtcccctccattctgtcttcaccaagattttaatttcagttattttattttttctgttttaatttttccattttggttttctttatatgttgtttttttctcattggtttctagcacagttgctcactaaagaaattttttgatggccgatttaaaaccaccataaatcatatcagataatttgaacatctgtgtcatctttctgctgatgtcaggcaattttctttttcatttaagttgcctcatgtgtctttaaacccaaagttcagccatgactatcgtaaatgttctcagtctcaagtaatgaggcttttcatgattagacctgagctctgtgttattcttctacctatgttgtgagcagagttttggtgcgttatcagccattcacattcttttcgtctgtgttcccctcaaaggctgtcaccctgctgtagtgttttccttatgatgacgtcctcatgaagttgttccatgttttccttaggatgatgtcctcatgaggttgttccatttgggttgtgcccttgacagcatttgtctcatggataaagtggcctgttttattttaccctttcagggggctcacatagctatctcttcagcttgactagtgatgcaatttgtccagaaatttccttatcatttgtgtcccttgtatcccatcagccttagccacataaaataaatcctttccattcatttagcaaatatttactgagcccttactgtaaggtggtgaacaacacagccaatgttctgctttcatgaagctttcagactaaggaagaacacttattcctatttcatagaataactattattgagagaactaaaataggttaatgggcttgacaatgagtgggcgataagggatggcctctgtgaggagagaatatgtaagctgaaatgtgattcttttctggaatttccatttctgtttatattatacatctgttctttcatatttctactttgccattagaatttgttatatattgaattgtgttctccccctccccaccccccatttatatgttgaggttctaaccctcagtctctcagaatgttaatgtatttagagatagggacttttcattagagtaaaattgggccattagggtggaccctagtccagtgagactggtgtctttataagaagagaagatgaagatacatggagaaaccccaggggcctgtgtgcacagagggatgaccacatgaagaggcagcaagagggtggcgtctgcaagccaaggagggaggtctcagaggaaagcaggcctgctgagaacttgatctcagacttccagcctctagagactgtgagaaaataaattcatgttgttaagccacccagtttgtggtattttgttatggcaggctgggcaaactaatacaaagccattagcatattaatcatagatattctgaattccctatctgatacttctaaaatctgtcatctgtgcagctggttctgatgcttggtttgtctcgtcagactgtgatttttctttccttttagaatgccttgcaatttttggttgaaagctggacatgatttattgtgtaatggggactgaggaaaataggcctttagcgtgaggtgttttggtaatctggctaggagttgggctgtgtttactgtaggggacagaggctttatactcttctagcatccttgtttattctcccctcttccctttgggtttccctaagaattcctccttagatggaattgatgtctttcagctctctcagctataataccgttttaaaaatccctgttgcgtgttatgctctctcatctctgttggtatgatttaaggtgtgtgtggagaggagaagtatttatcatctcaatcttttagtgggcctgtgtctctgggctttggtcttcaaaagtgtttcttaaccccctcccctgcttaggtaagtcagggatggcagagaggcctggagtgggagaaaagcccttccctttaggtgagataaggctctggtgaggtctttccctggaaacagggtgtattcataatggctactcttcctgtccccctgccagagccacgagggagctttcttcgcactttgagaacctcatggggttcctagagacaaaatccacaaaaatatggggcccccctaagactgcgacccccaggagttcctgattctcatggttgtccaccctcagcttccaacaatttgtcatttaaatgttcccaccggtatggctacagcagcttttcctccagggaagcagatcttgttgtgactctccagatttcatggtggccttaattctttgatgggtccaagaaaagtcattgatttgtttgttctgcttttcttagtgaaggatggaagtgctgatttctaagctctttgcattgttgacaaaaagtgtcaaactctgtaaaatatttgaagggatttattctgagctaattatgagtgaccataatgagggcctgtgacacggccctcaggaagtcctgagaacattcagctcaaggtggttgaggtacagcttggtttaatgtattttaggaaggcatgagacatcaatcaaatatgtttaagaattacgttggtttagtttagaaaggtggacaacccaaagcaggggctttcaagtgataggtaaatttaaacattttctgggtgacaactggttgaggttgtctgaagacctaggatcaatggaaaggaatgttcaggttaaagataaaggattgcggagaccaagttttattgtgcagaggaagcccgtagatagcagacttcagagagagcaggttgtaaattgttttttatcagacctaaaagggtgcctggctcttaattgattatctcctggatctgcaaagaaaggaaggaaaataaaagaggaaggggattctctgtagaatgtggatttttcccacaaaagactttgcagggcaatttcagggcatggcaaggaaatatattttggagttaaatattttgtccttgtctcataatgttatgccagagtcagattgaaaagtaagtcacaatatatagggtcaaatacaactcatctgatgagaatccatggtttgtagggcatgactccccagaccccttaggtaggaatttgggcaagatttaaaaaatcggagcttagttctcagcatgttggagctggaattgctctactgagtgagatttgaaaggagcaagacatgtgaagattggggcaggaacattctggttaagaaaatgcagagcaggctggcgctcctggggcatggtgcagatggatgagtgatacgaggggaacgccgggaagcaggagggcttgatctggcggggcttcatcagccagaacgaggacttgggtctccatcatgagtgcagtgaggatctgtgggagagcagggaaggtgtgtattctgatttctgtttaaaaagtttaaaatacaaaaattagctgggcatggtggcatgtgcctgtagtctcagctactcgggaggctgaggcaggagaatcacttgaacctgggaggcggaggttgcggtgagctgagatcatgccactgcactccagcgtgggcaagagaaccagactctgtctcagacaaagaaagaaacaaacaaacaaacagtttaattctagctgcagcatggcagatggataggggtaggaagaggcaagaatgcaaaattaaataagcaagccaccaagaaggctattacagtagtctgggggaagcaggatagcttagactagggtggtggttatgggcttagggcgtgttgggaggtagagttgataagatgtgatgtgagagaagagacgaatcaataacaatacctgccatctttgggtgggtaaatggtaatgctgtttactgagaatacctgcatctttgggtgggtaaatggtaacgttgtttactgagatggggaagatgaggcaggagcacagagaatcaggagttgggtgttggccttgtgaaacctgagttggcagtaaattcccaaggggagttgtccaggcaagtttttgtggctatgaagtctggaattccagggaaaggctggggttggagaaatggatttagagtcactggtagatacatgggatttgaagtcatggagtagacgaagtcacctaaggagagtagaaagagaaggaagcctaggacagagccctgggctagcatctaaaggagaagtataaggagggactggtgaaggagtgctatggaagccaagaaaagccagaggagtcaagtgagacgaaagctgagcagtgacaacatggaggacattggtgaccttgagagaagctgtctcagcagtgagcagatggtagcgtgactgaagggtgaaggtgaggtggggcggtagcaacaacagaccactcttgtaatattcctgggaagggagtcaagaactgggcagaactggaggccagtttggggtcaaggaagattttttttttttttttgccttcttgttctttgaagcttgtaagaatgggcttatgttgctgctcgatgactccatgttcctaggtgctcaaggagcctggggcattgcctaagatgtggctgacatggtccagaatccatatgtgctttggaggtggccaggaagcccataggaggagggaatgctcagtgtgtgccctgagagctttgccactgtcagaaagcacctgacaggaacaagtttgattgtatttgacacatgccggcactaccacagaaagttttagcaacagataagaggggacatctgtactctcaacttcttttttcatacttcctattgaagttttcatctctactctcaggcatttaatttctaagactgctgtttatttttaattgtcttaaaaaatagcatcccattcttgtttaacagatgatatagcttcttttacctccttgaggaagatattaataatagttttttaaaacttttcttctcactgcacaatctcttttctttgtcctccttttgttcctgtttaaaatgatagccatttatctttttctcaggtgtctggtgatgtgtggttgtctggtcatgtttaacagtgggatttataatgccgattggaagctgtgagcatatgggtggagcttctgaacttttctgcagtgtgagctggtgcatcaattaattgggaacccataggtcagtatcttcgactgtgttgtcttgggttgttcagattgtctggagaagactcacccacccttatttctggagggatgaaggcctataaactccggaaacaaagtagagatagagggaatgtcttagagcttgtaggtatgtgtttatctaatccacatgttttccagacagaacctccatcctcaattgtgcctgatgtttcacctccagagattctttagaaaataaatgtccaggccaggtggggtggttcacacctctaatcccagcactttgggaggctgaggtgggcggatcacctgaggtcaggagttcgaaaccagactggccaacatgatgaaaccccgtctctactaaaaatataaaaattagctgggtgtggtggcaggtgcctgtgatcccagctactcaggatgctgaggcaggacaatcacttgaactgggaggcggaggttgcggtgagctgagattacgtcactacactccagcctgggtgacagagtgagactctgtctcacaaaaaaaaagaaaagaaaagaaatgtccagtctctactagggaagggcatttttccagaggcagggaataggggagagggtccagggatctaatttcttattattatttttatttttttttagttttgagatgcagtcttaactctgtcgcccaggttggagtgcaatggcgtgatttcagctcactgcaacctctgcctctggggttcaagtgattctcctgcctcagcctcccaggtagctgggattacaggtgcctgccatgacacctggctaatttttgtatttttagtagagacagggtttcaccatgtttttcaggctggtctcgaactcctgaccttaggtgatccacctaccttggcctcacaaagtgctgggattacaggcgtgagccaccaagcctggccttcttcttatttttaatataaagccagatttgttgagttataatttacatagaacaaaattcacttgttagtagacaattgtatgagttgtgacataaaactatctcagcatataactcatatgctgagttatgtggtaagtatgtgtttaaatgtataggaaattgccaaattgttgtctcaggtggttgtaccattttatttattttattttattttattttattttattttattattttattttattttattttattttattttattttattttattattttattttattttattttattttatttattttatttatttttgagacagagtctcgctctattgcccaggctggagtgcagtggcacgatctcggctcactgcaacctccacctcgtgggttcaagtgattctcctgcctcagcctcccaagtagctaggattacaggcgtgcaccaccacacccagctaatttttgtatttttagtagagatggggtttcaccatggaggccaggctggtctcaagttcctgacctcaggtgatctgcctgcctcagcctcccaaagtgttgggattacaggcgtaagccactgcgcctggcctggcagtaccattttaaattttcaccactaatctatgaacattccagttgttcctcattcttgtcaacacttggtattttcagatttttattttttaattttagccattctaataggtatggatttaatttccatttttctaatagccatgatgctgagcatctttttgtgtgcttgccatttgtgtatctcctttggtgaagtgtcttttcaaacactttccctatttttattgggctgttgtgttactgagttttcagagatgtatgtgtattctggatttaggtcctttatcagatacgtgttttgcaaatgttttgtcctcatctagtggcttgtcttttcattgtgactgtcttttgaagagcagatttttaaaattttggtgtggctaataaattatttagttgtatggattatgcttttggttttgtgtctaggaaattgttacctaattcaaggtcacaaagatttttctcctgttttcttccagaagttttaaaatttggggttttacatttaggtatgttattaatttttgtataatttttgtatgttaggcaaggtatagattgaagttctttgtttttgcatatggatgttcaatttttccagcaccatttgttgtaaaggttattctttcttgattgaattgaatgtatacctttgttgagagttcacaaagctgtggtctgtttttggatcctctaattttatttcacttatctctttgtctgtcgctctgtcacttgaccagtaccacactctttatggccataaatgttgaaatctagtactgcaattccccaacatttctctttctctaaattgttttgtctggtctagttcctttgtttttccaaataaatttgagaattacttgttgatttctgctaaaatttcaacttggattttggttggcattgcattgattatatagatgaatttgaggagatttgacattttaacaatattgagtcttctagtccataaatatggcatattctctccatctatatgtctgtggatccttatatctgtgttttgttgttttcagcatagaaatcttgcacatagtttcatgagatttatacttaagtgtttcatgttttggtgctattatataatatatggtaatttttaaaaaacattagatttttaattttttgttataagtatgtggatacaattgacctttgtatgttgaatttgtattctgtgactttgctaaactcaattagttctaataactttttttctagtttctttgggattttctgtatagacaatcatatcatctgcaaatagagacagtttcatttctgcctttctaatcaataaaccttttatttctttttcttgccttactgcacaggctaggatctctagtatgattttgaataggggtgataggatattcttgccttgtacgtcatcttaggaaagaagcattcagtcttctatcattaagtatgatgttagctgtgtgttttttgtagatgcccctaatctggttcaggatgttcctttttattcctgttttgttgagggtttattattattattactgttatgaacagatgttgaattttgtcaaaaggcttttctgcatttattgaagagataattttttttttcttctttagtctgttgttacggtaggtgatgttgactgatttgcaaataatgagccagccttccattcctagaataagtgtctattggctgtgaagtattatcctttttatatattgctgaatgcaatttgctatttttttgtttaggattttcgtgtctttgtttatgagggatattggtctgttcttttattttaacatctttatctagttttggtgtcagtgtaattctggcctcataaaaaaaagttgacttatttcctccttttctgttttctggaagacttgtttaaaatttctattatttctgttctaattttttgatagaatttgacaatgaagctctctgaaatgttatacattgcatgactgtttacctttaaataataatccgctgcttcaggtatagtgtaagtaccttaaaacagtgttttcccatctattgatcatatttatttcagattctttttctgaaattcctgtattattattccaggttatctgtgtgtctgcttctgttgattgtcacttgacaatgagccttttgtttcctttgccttcttttgtttgtttgtttgtttgtttgtttgtttgtttttgagacagagtctcactttgttgcccaggctggagtgcagtggcgcaatctcagctcactgcaacctctgcttcctgggttcaagggattctcctgcctcagcctcctgagtacctgggattacaggcgtgcgccaccacacccagctaattgttatatttttagtagagatggggtttcactatgttggccaggctgttctcaaactcctgacctcgtgatccgcccgccttggcctcccaaagtgctgggattacaggtgtgagccactgcgcctggcctccattgcctcttcattgtaatttttgatttcagtgttggacattgtgtggagggcagtaggcaaggtcaaaaaactttttctgtaatgggccaaataaatattttgagttttgagagccacgtgtagtccctgttgcatgttattcttctggtttttacttttaaaaaattacccttaaaaaatgtaaaacctggcaggctgcaatggttcatgcctctaattctggccctttgggagactgaggtggaaggattgcttgagcccaggggtttgataccagcctgggcagtgtggtgagacaccgtctctacaaaaaaatgtgaaaaattaactgggcgtggccacatgttctgtggtccctctttcttgggaggccgaggtgggaggatggcttgagcccaggagattgagactgcagtgagccatgattgtaccagagtactccagcctgggagacagagcaagaccctgtctccaaaaggaggaggaggaggggggggggaggaggaggaggaggaggaggagaggagggggggggaggaggaggaggaggaggaggaaagaagaagaagaagaagaaaaaaaaagtaaaaccattcttagcttgcaggctgtacagaaacgggtcatgggctacctttggcctctgggccatgcgtaccctctctgtagaggggaatgaggtgggtagatagtgttatattcaggaatggccactcctctttttccgctgggttttcattgttggggagttaaggtgggtctgggttttgttgttgtgtatgtaccttccatcccactggcttcaaattcctctaacctttccttgagcttaggatgagggctgagttgccaaagcgtcttcacccatggcttttggccttgcctctgtgtctgccttagctgccccttatctttggcaggtctctactagagaaagttcccctcccttcccccaaagtaggaggactctaacaggctggcttaagatggctcctggaccctccctgagggctagagcagattgccttttatcttccctggccacagcagtcttctgattctgtaggtgagaagcttcttgttagggcttagtgctgtggcagctcccactgagagactgttcagtctgctctttcagtctacatcttaaaaggtttttttttaatttttttatttgttaagtaaatgtgctaagaaagaggtgctgattttgagcctggttccagttgcagtacccagtcaaggagtgaatttacggcatcgtaaaggctgccagtagagaggaatggtaaggaaagttggctccactctggtgatggattgaagcttccagtgggtttgtctagctattttttagtggttgctacaatgtatgcaaggctaccagattctataagtcctggggccattcccatggaaaataaacaacgtgaattttatatacccagtgacattgtgtaaactcagtggccctgataagtgctgtatctgtatgtggtccctgagggatttgctgcaattggagtgaaaaagaagtaatactttttaaaacaatcttataagtggacagaatgctactgtcgacaaagagtcaaactctgcaaaatatttgaagagatttgttctgagccaaatatgagtgaggtcctgagaacatgtgcccaaggtagttgggtgcggcttggctttatacattttagagaggtgtgagacatcaatcaaaaacatttaagaaatacattggtttggtccagaaaagtgggacaaagctggggggcgtggggcttccaggctataggtgaatttaaacattttctgattgataaagacctgggattgatagaaagggaatgttcaggttaaggtaaagattgtggacatccaagttcttttgaagtcttatggtggctgccttagagacaatagatgacagatgtttcctattcagatcttagttaatctctttaggattaggagggtctcgaagaaaaagatctagctatgttagtagagattctttacaaatgcagattttcccccacaaagaacagctttgcagggccatttcaaaatatggcaaagaaacatattttggggtaaagtatttttattttctttcttgtctcataatgttatgccagagtcaggttggaaagtcatgatatatagggttaaataaaacccatctgatgagaatttgtgatttgtaggacatgactccccagaccccttagataggaatttgggcaagataaaaaaaatcagagtttagtcctcactagcaaacagagaaagccctcatctttctagtttaacactttaaaattgtatgactgtaatatttgaagatgatggttattagactattgagttttttgatgctgcttttatgagctaagcttttatatcaagcagtgactgtgtttctgggttatcctgtagttttctaaactgtcaaacgtgttattcagaaaggccaggaaccccttgaggggtagattgcagtagaacattttattctaggccaggcgcggtggctcacgcctgtaatcccagcactttgggaggccaaggtgggtggatcacttgaggttaggagttcgagaccaacctgaccaatatgatgaaactccatctctactaaaaatacaaaaaattagcgaggcatggtggcacacacctgttatctcagttacttgggaaactcctgcctcagttacagaggaaagctgaggcaggagagtctcttgagcctgggaggcggaggttgcagtgagcagagatcatgccaccgcactccagcctgggtgacagagcgagactctgtctcaaaaaaataaaacaaaaagaaaaaagaaaattttattctaaccagaagcattacctcttttccctagatccagatgcagaggtgtgccttcatgtactgaggcttgtccagtctgtggttctggaacctgaagtcttctccaagtcggcctctgagttccggagctccctgcccctgcaacgcatcctggcaatgtccaagagccgcaacccccgcctgcaaaccgcagcccaggagctcctggaagatctccgcactctggagcataatgtgtaggtgtgctcggccaccagggttttggtgaaaatgccggtgtcccttctccccagatccctcatttgatactccaaaaccatcaccatgtaccatgtgttagagttggcaaaatgtgattgactagagatggacatgaattgatatgtatcccacataactttgtcttggaagtgagagtgcttgtaggtggttggttaagcttgccaaaggagaggccatgaaagaacctgtccttctggaaaagtggtccatgtctgtgctggctggaagagggcttgcttagggcagcttcttgctgctcagcagaccatgacctgtaggttcacctataaaacagggaaattgaataaccatctaccccattagtcagcattttcttgagatacatttctttgaaaagcaattcattctctctctagtaattgtaattaatccccccaaaatgcaagtttacttttataaccttttggtgaacctgctatttcggatgacattgggcattttagttctatattttttgtgcctcttttatttttgaataaagaaaatcagaagagttgtattacgacccttgctgtctaaaatctaaacttgatattaggaagttagatttctgcatattaccatgctactcttggttggtggaaaaaaaactcttccttaaactgttctgggccctttggctataaacttagaagtcctatttttcttataacaaatgctgtaaaaacaacttgtataatagattagaacacatgcagttagttgagattccataaatgaaatgatagttccagctccctttttgtgcatgggtgtgcctgtatgccagggccctgccatgtctgtgttatctacctactggttgccatccagcttgttttctaggccactggcagagagcaagggagaatacacttcatttctcatggacaccatgattggtgagagttgccttttgtattagtctgctttcacactgctgtaaagaaatgcctgggacttggtaatttatagaggaaagaggtttaattgactcacagttcactgtggctggggaggtctcaggaaacttacaatcatggttgaaggggaagcaaggcaccttcttctcaaggtggcaggaaggagaatgaatgcaggagaacctaccaaatatttataaaaccatcagctctcttgagaactcactatcacgagaacagcatgggggaaaccgcccccataatccagtcacctccacctggtctctcccttgacacatgggaattatggggattataattcaggatgcgatatgggtggggacgcaaagcgtaaccatgtcaccatttaaatcaatccttaaagtcacgtcacgtgaacacattcccttcttttcctgggctgcttccttcggtgtgatgctggagggctgctgggctctgggcatgctgtaagagcaaaacaaatgcaggtgcaccccaccagtggcagccccatctacaagaataagctgttttgttgcatatggcattttagagtaacttcatttttcttttaagtacatttttataggcagtgtgcaatttaaggctgaggctgagtgaagaagtgtagaggaaggcacagttgcttggatttcacgagccagcatattgtggaacactagctcatctgagccagaggaatgttgcaaaaggcaatttaaaattcatggaggcagaaatcgatccatctgtgctgtgtggttctgtaggtcctgattattggtgaataaaattaagaatgttgtgtttctatacttaatagcatggtgctatcttctttttgattgctatttatttaataaggtaatggggaatgctgcctctagaactacaggacctctttctgccagagatggggtcaacagtgtatagagaggagtgagcgttggccagactcttggatgttgtgtagtttagctaattagtggatggatgtgtttaagaaggatcatttcttttctcctgattttgaggtgctaagaatagcaagagttcttacgaaaactcttttaggaagaaacatgtgacaactccatattttgaatgtatatcctaggaaaagtacataaggccagttttaaggagtgatctgcctcctgctcttcatatgaaggtcaacaggaaaacacaggttctttaatttttctacaactagttatctaaagaaaacctactcagttttttaaaaggtattcataaaaagcatgtactttgcagatctcgtgaattttaaaatcagacaaagtaaaatagtgcatatattttgaaatgtttgtttgtttgtttgtttaaatggagtttcgcttttgttgcccaggctggaagcgcagtggtgcgatcttggctcactgcaacctccgcctcctgggttcaagcaattctcctgccttagcctcctgagtcactggaattacaggcacccgccaccaggcctagttaatttttgttacttttagtagagatggggtttggccatgttggccaagccggtgttgaactcctgatctcaggtgttccacccgcctcggcctcccaaagtgctgggattacaggcatgagccatggcacccggcctatatttttattttttgacacaagagtcttgctttgtcgcccaggctggagtgcagtggctccatctcggctcactgcagcctccgcctcctgggttcaagcgattctcctgcctcagcctcctgagtagctgggattacaggcgtacaccaccatgcctggctaatttttgtactttcagtagagacatgttttcaccatgttgtccaggctggtctaaattccagatctcaagtgatccgctcacctcggtctcccaaagtgctgggattacaggcgtgagccaccatgcccagcgttgaaatgtaattttaacagaattcctcttacatttattaagttaaggaactatttttctccttggtaccatcagtttgtatgtaaaggtgtgaaacctggcaggcccgacgtcagacttgactccctccttcctcaccccttcccccacatggctccgagcattcctcttgctgtctggcagctcattaaccatcagagctgctttctcttcagtccgaaaagagcaaatccttgttctgacggagagcaatatggagacttcgtggggggctttggagacccatgcctcctcgtggcatagcttgggataagcctcatgccacagagttcttctagttccctacagttatatcgcctgtgccattcactcattccagaggattttaaagttaattaaagtaccaagcataggatcacaggtctggagcctgaagaaaattagaccaaggctggaagtcaggccggggtcaaggaagtgttgatgaaaagagtcaaactctgtaaaatatttgaagagacttattctgagccaaatgtgagtgaccaatggcctgtgacacagccccaggaagttctgggaacatgtgcccaaggtggatgggccacagttcggttttatgcattgtagggagacataagacatcaatcaatagatgtaggatgtaagatacattcgttttgtctggaaaggcgggacaattggagggggcggggggcgtgttccaggtcataggcagattcaaagattttctaatcggcaattggttaaaagagttaagttattatcagaagacctggaatccctaggagggagcatctgttgtggagaccaaggtttttattatgcagatgaagccttcaggtagcaggcttcagagagaatagattggaaatgtttcttaccagacttaaggtaccagactcttagttaattctctcctggatcagagaagaggaaaaggattctctacagaatgtagatttttccccacaagagacagctttgcagggccctttcaaaatatgtcaaagaaatgtatttttgggtaaaatattttgatttctttcatggcctggtgtctgtcatgtgatgctatactagagtcaagctagaatttggtgtctgattgcaacaaaaagtctcaagatctctgttttaatgtttataccagtcagttgtacctgaattccaaagggaggagggcataatgaggcatgtctgacctccacgtcccatcatgacataatgaggcatgtctgaccttcacttcccatcacggcctgaactagtttttcaggccaactttggaaggcccttggctgagaggaggggtccattcagatggttgaggggcttagaattttatttttggtttacagaggttttgaataaagcttgtaaatgtgcctgcccattccattgattcggctggacctgccattagctattttgccacacgttaatataaatggaaaaggttgataaaaacttttgcagacttactaatttctgagaagtcctgaagtttgttctgttttcttccatggcatagatgctgagaatgcctcagaacttctccaaccagtgtaggatcctgagtatagaccctgatgtagtgtaggatgtggcatcctatagggcattgaaaggtctttggatgctttttgagtccaggctcaggtaagaagggcaagagataactggtacacctctgtcttcacaaactctcatctttaagagccatggctgcctctctgctctgagaatgcacacatttaaatttatctccagatgtagactaagaaatcggagtctttgtgctaattagtgcatgctatgagatgaaaagtgttgttactgtcctttttaatttgtaattttaaaagttttaaaaattgttaaatatacctaatataaaatttatgttttaaccattttaaagtgaagactcagtggcattaagtatgtcatagtgttttataatcattaccattatctatttctgaaacttttcttcattccaaacagaaactctgtacccgttatataacaacacattccctaaacctttctcccctggcccctaatatctgctcttctttgtctccatgcatttgactactccacgcatctcatagaagtacagtcatatgatctttgttcttttgggtctggcgtatttcacttagcatcgtgacctcaaggttcatccgtgttgtagcgtgtgtcagaactcgttccctcttctggctgtatcatcccatgtgtggacacagcacatttcgttcattcatccatctgttgagggacacttggcttgttttcaccttttggctgttgttaatagtattgctgtgaacattggggtacaggtatctgtttgaatttctgctttcaattttttggggtgtgtacttaggagtgaaattgctgaatcacatggtaattctgtgtgtagctctctgaggaactgccaaccgctttccacagcagccgcaccactttacatccccaccggcagcagtgcccaagggctccagtttctccacgtgttcatcaacatttgttattttctgttttattgataatagccattgataatgggtgtgaaatgcatcttattgaggttttcatttgcatttccctaatgacgaataatgttgagcatctttccttgtgcttattggccgtttgtatctcttctttggagaaaagtctattcagggcctttgcccatttttgagttgggttgtttgctttctgttgttgagttacaggagcgaacgccttatcagatgtgggatttgcgggtattaactcctattctctgggcttctgcactctattaatagtgtcctttgatgtgcaagagttcattttggttaaatctagtttattgatttttttcttttattgcctgtgcttttggtgtcatatccaagaaatcattgtcaaatgtttggtcacaaggattttctcctgtgttttcttcttcgttttatagttttatctcttcagtttagatctttgatccattttgagtcaatttttttcatatcgttcagctaagggtccggcatcattcttttacatgtggatatttcagttttcccaccactacttgctgaattttataattattatttgaaaatggtattacaaatgtgattttcaaaactgaaacacttatgaatactatgctcatatgctcaccatatgtttaaattatttggtttcatgaatagccttttttttttttttttttttttttttttttgagataggatctcattctgtcaccaaggctggagtgtgatctcggctcaatgcagcctctgcctcctgggctcaagtgatctcctgcctcagcctccagagcagctgggactctaggtgtgtgccacaatacctggctaattttctgtattttttgggggagatggagtttcaccatgttgtccaggctggtctctaactcctggactcaagtgatccacctgcctcagttccccaaagtgctgggattacgggcatgagctactgcacctggccatgaatagcctttattataggattttatattgttccagtggagctccctaagttgctgcttttcccgccataaatgtacatttaatgctcttagatcatactcagcacaaaatgactgttagctggaaaaatgactcccactcacatagtctattatattttttaattgaagtcatacttgcagcccaacttttcaggttaaatggtgttatgcaaaatattactgtttcgatgtctgagagcagtgcaggctttgggaagaagtgcaaaggccctgtaagtgtgggcttggtgtatgtttgaagggcagcagagagtgctcaggtgctggctgggagacctctcgccttgctctgtgcgatgactgtggggcctggggcaggagcagcctctgattcacacttaaaaatgtaaaaaaaaaaaaaaaaaaaagtggaacctgctcttaagattgtcagatgaccacactgtcagcctctagtcatcgctgccctccccacccccagcacctcaaatggcaaaagtcctcgagactgctgaagtgagtttctttccaaacatgcctccccaaggtgaagctttcactctccccacagactccagccacacccagatctgaggcccaagtgtgcatgttctcactggatactttgcccagctgccatacacacacttggtcctgcatagcatgggctgacgtgaaggtgataggtccctgctggagtggggcctgccacctgcccaccggggaggaaagcatctcctctgccatcctgtgccttcatgctcagtcgctggcaccagcagcctttcctttggccatggctcatacctactctctttttggatcataagccctagaactgtggttcttagctgttacagggtcatgggccactctgagaatctgagaaaccttctgtatacaaaagtgtatggacatgcttatctgatgtttcatctgcagtttctgggagtttgtaggattccccccaggatcatttactttttggtaaggagccgtttgccctgggcttgtggaatttgtgtggcctagtgtagtaccaggcacataaccaggcacttgagcattgaaagcatttaatgatgtctatgacactgtaaggcgtcccacattaacggtagtcccatagctgaaaacaaagcattggcttcctggtggcagttcagaacctctgcctgatttccttcagctcagtcagtcctcacggccaccccgtgaggtcggcatcaccagccacactctgcaggtgaggatactggactctagtgacagagttgcggttacagtctgtgcctcttggtgtcacctccctttccctgggcccgtaacctcatctagggtcctttgccttcaggccagtgtctgtcctgcgcctgggcatttgcagttctggcgatgagctgcttcaccccctggcagagggtctgcagcctctctggccaatgtgccactctgctgccaccagcaggcccatggggtcaagagggtgggaagagaatgggaagtagttggtgtggtggggggcagtaacccctgctccccaccaggctggtattgagacaagatgtgctgataagtgacaggctcctgtggctgcctgatcacacaataacattgagaaagaagagggagagttggccgggtgtggtggctcacccctgtcatcccagcactttgggaagctgatgcgggtggatcatttgaggccaggagtccaagaccagcctggccaacaacaggaaaccctgtctctactaaaaatacaaaaattaggtgggcatggtggcacatgcctgttgtcccagctactcaggaggcagaggcaggagaatcgcttgcactgtggaggcagaggttgtagtatgccgagatcacaccactgaacttcagcctgggcaacagagcaagacttcgtctcaaaaaaaaaaaaaaaaaaagaaaagaaaagaatagggagagacagagattaattatcaatatcaaaagccttgatttttaaaaggttctgttcagtatctgcagcagtttataaaattatcattcctgtctccatgagctgcatgctcaggtatcactacaacctatcttaccttgcttagaatcattgagtagtcctctctttcagtcttttattttagattccacagagctgagacaaaccagggcaggagcaggacaaattctccctgctctaggccagaaagccagcacaggacattgctaggcttagagttaacaggacctctcccttggagatgtcccctgctctgggcaggcaggtggtcacagcccagggctgacatgaccaagccagaatgggcagggagaggggcaggtaagagcataccttgcaatagcgggtgcttctgctttgttcttttctttttgttttttttagtccaaatactgatagaagagaaataaaggggcatctgaaacttagacgaggttaagattacttaaggacagagtggagtgagcctacaattcacaaagtgtgtatttttgctgggagctgaagctcacccgttaggcatcagagcttttttttgaaagaaccattttaatggaaattcttaaaaaatatatcgcatgcctgctcctttatacattgtacttggaatattttcctcttcttgatgaatcagtgtccttccctccaccaccctcagccagggaagtaagttttccagaaacttagtactacactttggcatttgagcacacttccttcaattatgagagtagaaggctgttttcttacatttggatgaaatttctcacctctctgtacctaaggttctgtgaaacttgttgtaaaggggctgggggtgcatgtgttggcttagatacctgttccttagaggtagtttaggtttggccctgagcccagggaaggggaggcagcacctgaatgtcccatgagctgttgtgctgcttggagcagcagcctctgtgtgtgccgtgttggggtgtgtgtgctgtatttgggggtatgtgggtgtgctatgttgagggtggcaatcagcagactggggcctttctgttctctcatcaggttgtgaacccaaaagtatctgagacttgcctcaatcaatttagaaggttaattttgccaaggttaaggatgaacccgtgacacagcctcgggaggtcctgacgacatgtgtccaaggtggtcgggccacagcttgcttttgtacattttagagagacatgagtcatcagtcaatatgtgtaagaagtacattggttcagtgcagaaagatggcacgactggaagctgggaggagtgggagggcattccaggtcataggtaaacaagagacaaaaggttgcattcttttgggtctttgataagcctttcactgaatatacaatttacatgtgagaggcaggtagagaggaatagtcacttatgcctaagcctggctcagtgaatctgcacttttttttttttcgagatggagtttcacactcttgtcgcccaggctggagtgcagtggcgcaatcttggctcactgcaacttctgcctcctgggttcaagtgattctcctgcctcagcctcccgagtagctgggattacaggcacgtgccaccacgcctgtctaatttttaaaatatttttagtagacacagggtttcaccatgttagccaagctggtctcgaactcctgacctcaggtgatccacccgcctcagcctcccaaagtgccgggattataggcgtgaaccactgtgcccggccaaatcttcatttttatacataaacaatagggcagaggaagccatcagatatgcatttgtctcaggtgaccagagggatgactttgagttctgtcctttgtcccatacctgtgaagataacttaccaatttacattgccagggtgaaaatcaacagaactgttttagggtatagatcttgaggcaaattgtgaaggaggtatgtagcttttttttaatctttgtagctatcttatttaggaataaaatgggaggcctgacgcagttcccagtgtcaacaaaaagagtcaaactctctaaaatatttgaatagatttattctgagccaaatatgagtgaccagtggcccatgacacaaccccaggaggttctgagatcatgtatccaaggtggatggagtacagcttgtacattttagggagacatgagacatcaatcaaatgcatgtaaatgtactttggttcggtctggaaaagcgggacaactggaaggtgggggcttccaactcataggtagattcaaagatattctgattgacagttggttgaaagagttaagttattgtctaaagacttaggaatgtctgggttaagataagggtttgtggagaccataggtgaagcctccaggtagcaggcttcggagacaatagattgtaaatgtttcttatcagacttaaagaccctattctatcagtaattccaaaagggaagagggtataatgagtcatgcctgacttcccttcccatcatggcctgaacttgtttttcaggttagctttggaatgcccttgctgagaggaagggtccgttcttgtcgggggacttagaattttatttttggtttacaccagcttgactttgccctttggcttagtgattttggggtcccgagatttattttcctttcacaaagtcttcctggtcttcaagaaggtgccttgagagcccttccttgtgccgccttctcctcggggacccctgcccctgtggctgcagtttaccctgggtggaaaaggcacccatgcccaggctggctagagcctctgccactcaactggttgggcctccgtattccttgggtgctgctcccactacctgtccaagccacccaccagggccccagactcccctagcacttctcctgggctgtgtccttccctggaggctgctgagctgccctggactctccccacagtcacaccacggtgggatccacccataacccctgccctgacccacagacacttattgcctgaatcaggtgtggacagagttcaagttgtttcagtgatgtccctggcaattcagtggagatgaccacagatctgtgtctgtctctgtgtgtgtgtgtgtgtgtgtgtgtgtgtgtgtgtgtgtctttgtgtgtgactgtgcctctgtgtgtgcctatctgtatgagtctgcatgtatgtgtgcatgtatgtctgtgtgactgtgcctgtgagtgttgtttctgtatcttgtctgtatgtttttgtgtgtctctgtgtgcatctctctctctgtctgcgtctctgtgtgtggggactgtcataccttccttcccatgctaaacatacctgtgtcttgactctagtccggcaagcttccctcgctacacctctgcctcaaccctaaggaatttggctgacacgcatactaaggttttctaagggggagttggcttttggctgtgtgggctggaactagggtttaggggaatgtttgtctcccatttgcttctggctctgcacccccgtgtatgagggggcaggagggcactgtgactgcacctctcccatgagcccagaagatacgttttaccctgtgggcactgaagacagggccaggtttctagggctctataatctttttaactatttttggctacaggtcaagtgtagatgtgtcaggggtcatagacctctgaatcctgcaggacaaacctgaagctatctgcttcatggagttaaatgttcatcagatttgcatttctcccttaaaaccttgtcactggaaacctgggtggaagtctggcccagtgcagaagccaccagactctcctgccagctccagaggctgtcttaggatccagagccccttgcttaatcctgttttctctgctgtgctggaagaaagtcccattcctgggtaattgccagaagaaaggctccgtcttaaggttaaaggagctagaatcacaaggggaatcagtaaacccagttcccaggccagggacccaagctttgggatgagcgatctggtcttcaaggccaaaatgcttgctcaccagctttctttctcctccacactctgtccaggtttgggggcactgtcttaggcccctttgacgtcatcagcacaagagactcagagcaaggaacaaaactgcctgtactcgccagggctcctgatgctatcgtctcgtaggaaaccctgaatgaggtctgggcaggtgaaaagccttcctgtttgtcctctcaattagtcacacttggttctgagccaagccgtctgctcccatgttaatccccagcctgggagggcaggctgcagccggcagggcttgcacaacccgcagtccaggctgcaaggtggcttctcttccctgtattttgcagccccggcccttactcagcacacactttcttgtttctgagtccttccaaaacattctggtctgggctgtactttgtgctgtttgggagaggcacccctcacctcagagggcagctggagacctcctgtgtgaggagggcttggcctccttcctggggtctctgctgctcaggcagggggctccctctccctctccatgtgcttgtgggtgggggcagaggtcccggccttgtctcatgtagaagagatggttccaggccacataggcctgagctggtctgctgcatggagtggcctgaccaccaagcagagagcaggaacggcaggggcagtgcttgtgcttcggggtttttagggatttatgaatgtgcacaccaagaacagcaaacaaaccaaagttcaagttatttctctttcttacaagtctgcatgaatatagtctcttccagaggaagttgattaaactctattgcaccagcctctgaagaatgcatagtatgaaatagcagagcatttcttgtggctcccagatctgccacctgcagtggggccaggctacccgacagctcccaggcctctgggcaccatagctgtcttcaggtgctccagctcaggacatggccattcagaggcaagaatcagcaagctccttccaggctggggcacatcctgaagccccatcagagcagccccatacagtggcttaggggtgtgggcttgtgtcctcctcatggaggaggggagcacgttttcccagcagctcaggtttccagggcccccccaccttccaggtgtgacagtttttcatacttaaaacatcactcaactatcagagtggtatactggggagaggcagggctgtgacagagagctgaagtggtgtgcaacagtcacaaacagctttcacctttgaccttggaacatgtgatgtgttttgcccaagttttcatttctccctgattgcatttagcttgggatcttgttaaaattcgtctgcatttccatagcataccctgagcactcaagaggcaggacaaggggttctagccagggacccagatgttcctgcagacattgcacactggaggcaagcgacgccaccagggtgaggctgtcctgatgcagcatccccaaagaggctgggccagggcagcagattttccctgcaacagggcatggggctcctcctgtcccctgccccttgggcctgggcctcacagtgtggacttgtctgaggtttacctggtgctccgtggcgtcatgaaagcctgttcctcaggtgtctctgccatttacccctctgtcctctagagagcacccattgggtgacaggccgacaagggtcttgcagaatctttggtctggcaccctgagagcttggagctctagggtctttctccatatgacaccaacaggcctgtctcttgcggagtgatgggtctgggcgccggacacttcttatgcctcctcacagcttccacacttatctttgcgccagccactgttgtatgcaggtgtgaccaacagccccttttgccctctcctgggcttttcagattgggcagggtgagataccaggaccataccaggccagcactcctataagcaaggcatgtgcagacaagctccattctccccagctcctcagagggtcactgaaggacagagcctcagttgtccatggaggagaccaactcaagatgcaactttggggctgacatttcctcctttctgctcccttggccattcctcttcctgggggtggtttctaaaaaccacaacagagctttatgcgtaggaaaagccctgccttgggctctgctccagtggaagccaggtccaggaggaagtcctgtgttcctgccccagtgcaggtcaaagtatgtatccctgatcattcatgcactggctacgtaatttacacttatcaagcccaaacaacctgaggaatgaaatgcacaagccagtaagcacatggggcagcaacccagctctctacagggcaagtccccctccccgtcccctgcagggctctccaaaatgctgggcacagtgagtgtgacagatcaatatcagaactctgtgctctggccctgggtcagaccctacagattcagggatccacagatcagggggttggactcaaaccagtcatcagaatacttagcagatgttttctaagagctagtgtgtgcaggcaccacgtatggcctgttatctgaatggtctcacatgcgcctccctatacacattcaaattcagttgaatacaggtattcaacttagcaacgattattattctatagatgaggacacagattttgaggttaaattctagaaagagtggctggggtttgaattgggcagttgatggtagatgctggccataatggaaagattttggggcttagagtgaagcactgatgcggaggggacacttttggtaggaaggggctctggcagtcagggtggtgtctgagctggactttgaaggacacacacgctctgccaaggagtcagagaaggagctgtggtaggaagaggggcttctgggcagagggataggatgtgcacccgcagggtgtcacttggaggggaggttggggccagtaggctgggagggccagcgtggcctcgtggtttctgtaccttgtgcccccaccaggctgtgttctttacgtccccagtgtctggaccaaataagtgccgtgtccaataaatgttgctgaactcaagtgaaggccactttccaggaggacagaaagttctagagggaggctgtcccagaaggaagttggggaaacaggaggatacctagctttggtcttgttctgttggggttggctttttcttttccttatttttttgtttttttcttttttagggacagggtctcactctgtcttccaggctggagtgcagtgccacagtcatagctcactgaagccttgaacttcttggctcaagcgatcctcccacctcagcctcccaagtagctggcactacaggtgtgtgccatcacacctggataattttaatatttttttgtagagatgggggtctcactatgttgcctaggctggtctcaagctcctagccagggcctcccagagtactaagattacaggctgaatttttcttttctttcctatctttttagaacgtctgagatatgtttcacagtggatggccagataaattggtctgttgaggcttaattgtttggataatgaccaggcctccattggtcacccagtgtggatgactcaccaccacattgtggaagaaggattgtatgtgttggggttgtgagcccagaaaagggagaagagcaaggcctcccagttctctctccagaaattcaaggtcgttggaccagcttctcaacccagcatttcttgtcttgccacctgggaagcagtggctgtcacactttgacagggttagtgcagcaggaatgacagaaacaagcccatggttgccttctttcttggcaaaaatcacctcagcataaatgctttttctctcattatggccgggtataaagggctgagcaaccctggccccgtgtgtgggagaaactggctggatgtgaagaatggggaggacagagaggccagctgcaaggtcatgagggctggcagaagcctgtgtggagggcactgtctgaactttatacagagggcggaccttctccttggcaacagaatgttctagcatcatactggagcctcccactgcccttggacaggctgcacctgagctcagttcctcctggagctcagccatccattcccagccctcaagaccagccatcaccaaaggcctgctcttcctagaaagttgtcactagaattttttggaaggcctaatcctttcttgggatttgggagggctgagtatctccctaagcatcggcttgacacctgcatctgttttcacgtttaggatgataggccattcaagttggaggcgaatggttactgcagcattttggggcactcgtttcttatccccttgtgtcccaagcccctcttctccagttcactggttgggatctgccctggccctgaggatcaggaaagggtctgtgaactggaggaggctgagggaggcccccagaggggccctagccggagtcatgctctgggcagtctcgagggcgatttgggatgagcatagctgggagctggggccctggacaggctcgaggacctgtgcccaggaacctctggagttcgagggtgggtacctggtgctgggtgggggtggctgcgtttacgtatgagtgtatgcacgtgtgtgcacacacataggcttgtgagtgtgtgggggtttgtgcatgtgtgtgcacgtgtatgagtgtatgaatgtgtgcacgcgtgtgcgagttgcaactccacagagagcttcacagagcccctctgtcaggagccttctctcccagtgtgccaccatggggttctctgaaatggggttctctgtgcctctcgtgccttgcctgctctcggaggagctgctccatggctactcgccttgtgcacagatgtgtgtcagtcatggtgctttcatctgagtggggacagttcagaaaggaaatgccctggctgcccctgtcgcccctcatcagcttctctttgtggcctcagccacctggtgctagcttctgggcaacctgaactaatcctggtggtggcccttccaggccgcccagccccttggccttgccacccctctgaaaagtccctttgggaaccccttgcctgcatgtttctacttttcttctcactggttctaagaccacatcccagcaagctggccccacacccggacctggcacagctggtcctgcccattggcacagcagccccctgtgcctcaccccggctggcccccttcctccctagaaaacttccatggcagcaccgtgttagagccactctgttaggaacacccttcatgttctcactgcttgcccactattgcgcttatctggcaaagctggccctggtgtcactcagctctgcctcttctgggctgtcctatgcagctgcaccgtggctgggaacagctgctccatctcaggaaacattgacagcacacatcccccatcagtccactcctgcccttcggataccagcaccccttctgccaccccctgcctcccctgacactcggatacactggggtcaaagttcccctgcccccagcaccagtgcttcctcctcctttcgcctgagccagctccctcccaggtctcctccaaccacgctggcctcctttcttgggtatctcactatgggcactgccctgggctggacccatctccagagcagcccccacactcagctccagcatcaaatgccaacaaattctgatcagtgtaaatctttttctttggcacatttggatgctaaacagatgtttcatgcttaatgtggctgcatcatatatggcgaggaactggcttatgcaactgtgggggtgctggttaggcaagtctgaaatccagggcaggcgggaggctggaaactctcaggctggagctgacactgagtccatgggaggaatctctccttcctcagggaagtttccgtgtggttctcaaggccttcagctattgacaggaggtccacccagatgtttgaggacaagctcctttacttgaagtcacccggagctaccacatgccctcccagcaactcctagagtaagagtttgactgagtagcggggttctgtgtccaggccctgtggactcagaaacagcagagccatttggtttcctccttcagtttctgtctcaccagactgtttttccaccctcagtcattctctctccagtggcttgttggatcttttagaaatagaaatcagagcagtcattccttccctggctgaaacttcccagtgcctccccaaggtaccaggagtcagctgggctgagcccgtgctctgggccacactgtacctgctgactcagctagcctgaatggtttggggtttcccttccctgctgctgtctgagtcagtgtcgggagtgagcatgtgtcacccaccaaggaccctgcctgttggctccctctagtcacacctgttcagacttgtctgttttggggctgtagcagggagggggttggggctgagggaggaaggctctgacccaacgcaagctgctgatgggccaagcactcaagctgaacagacctgcctggctcctctctggctgttggaacctcaccagacctcacatcctttctgcccttgaattgtgaaggttcccctggggaccttctggaaaagtctgtaaagcacccccctctcccggatggatagccccatcctgggccccgtcctctcctgtactgatcacctggctggtatcagtcagtggctgccttgcagggaggctgttaaaaggctcatgggagcctgaagtttctcttttgaagcagctcttcctgccttccccctgtggcctcgatttgttctctggctccatgtaagggcaccttctgagtctcagcagagcctcagcaagcggtgttggtgccgtaagggaccctcatcaactgcgtcagccgatgtctcccagcctgtgtctgtgaatgttagcttcttgggattgtggagtcctaattagggaaaaggagtcaggctggcaggaccaagggcaagcaaaaagagaaagcagataagctatagagttgactttcttcatggtccaggacacgcaggcctcctgctcaggtaactcatgatcttcctgggccgagctatggccagacacctccaagttagctcctggctgccttggcgttattagttctgcacgtcgccctctgcagcctaagaaccaccctataaaatccccagcaagcctttgtttctttgcagttggctcctcttctgctgattctgcccattgcaaccttggaatgcgttttcatactttctctcataaatctgcctttctttgcctacaactgtcttggtaaattcttttaccccagtaccaccggcccagattgttgctgctcacccaccacagggatgttacctgatgttgcagatcagttggcaccaggggcagaggagcctagaagccctgttgctctctcagagattcacaacaggtgccagttaaaggctctgagaaatccacagcagagacacctgcttactctgcttggcccagcatttcccaggcccgtctgaccatcgggccaccctagtccagccccttctagtctgtggagcatgagttgggaatcactgatcccgaccagactttcaatttgcaggaaatgtaaaggaaacagaggtgtcagaggttcagggactccccgaggcttgtataaaagtcaagagtgacgtcggccaggggacagtgtgcagtggcaaggaaggcatccacagggtgtcccaaggaggtcatgccagctggtgtgaggatgcagggcagatggcaagctcttgtgcccaggggacagtacagggctgaaaagggacagtatgatgtgcagctgtggatctaagactcacaggtgagaggaacctccagctcaccctgtctgttcttggagcgttctcactgtttaaagttctccgcacggagttgaaaacgcctttgtcttactcttcccctgtcatcctggctatgtcttcgggagctgcagagacgagttttggtccctctcacacctggcagattcttgagcatctgaagatggctttcctctcccctccttctcaccagcagcaacggcgcttcacagaagacactagggaagacagccctggaagagtgactcctcaagaataattgcctcctggagggagtgctgtcctgaggccctagctctgacccacagcagggtctggtccataggaaagaaaagccacctcacctactttccccacatacccctgggccgggcagagagtagaggatcctcggcaggactttgcattcgccctgtggatttgcatgggctcttctcttgtgcgtgcacatgcaggatgtcgccaccagactgtacccacctacctccagaggggcctcctctggagcactcattcagaaggatgctcgtcgggggactctcctgctggacacctctgtccctggggggcctcgcctgctggacactggacaccggacatctctgtccctgggaggcttcttctaccggacatctctatccctgggggtctcacctgccagacaacgctgttcctcgggggcctctcctgctggacaccactgttgttcaggggacctcacctgccagacacctttgttctgggggcttcacctgctgggctctgctgttcctgagggcctctcctgctgggctctgctgttcatgggaggcctcacctgctgggctctgccgttcttggggatccttgcctgggagtttgagcatctcatgagtctggttttcattctgttgaggccagtggggtagacagagggtggccccatccaggtgttcctcccagggttgggaaagaacagagaagcctgaggaggggcctccctgcctagctcagggccctaccagccacccactgctgtgccagggccaggacatttcctgggctcaggaagccgacctgaacgctaatgctgtaccctgcagagtgggtcagagcgtttcatcatggagcttcaccacgtgtttctgagacgggctggagaaaaggagatgagcgttaggaatggttgccacagcaataactcagagtgggatctaagagaaaggacttccttcttcctgcatgtgcatttgcaactgcctactccgtgggcacaggggaggctgctggcctgggttccaggtgttcatcaggaacaaggggtcacacaggctagattacaccctgaaacctccctctggctctcaggtgtgacgctgcatctgcgaccaggaactcggggatgaggggcagagtgggggcctcctgatgccccaggcttccagcactgagtatggagtacacctcacccctggggctcctggaagcctttcccatcctgggcacaaccacgaattcctctctgggtaattcagcagtgaaaggcatctgctcttcattgaagagcagcttgacttatgctcttcattgaaggtagctgtgcacagacctcaagcctgaagggtctaaggtgtcttgtgagcaccggctcagctcacagcagttgggagatgatccctcaggctgggtgggagagaactcagtgtgaaagacacagcccagagcggccgctgtcttgtagcgggattttttaaggaatcagagaaactgatggggtacaggaggatatttattatttaggtgcactagcccagtcggattaacatccaaacgactgagtcccaaacaaagagttaagttaccttttaagcatctcatggggcggggggagatctgtacagggggaagcatattacacaagcgagaaacaaagacagttatttaattaattgagacatgcattatgtcatttcttactttttaaggagaaacatgttttgcgacttgagtttatctgtgaccttgcagctgcacagctagggaatcagggtctccacaatgcctgggaaagggagagataaagctcactagccacagaaaaacaggcagttaatttttaaaggactccagctctttctctttctcagggggagttgggttttcttacaactgagtttctgcttacacgttctttaatttcttttaattcctgttccagtctcacagaggcgttttaaagtgaaagagccaggtgactgctgtctcagcagtggagaccttgccacgcgtgctctgtgagggcaggaccggctgtcctttagcctggcacagcaaggagtggtccagggtggtgcagtgccagggtgctgttgtcgccgtctctcagcctgcagaaggagtggggggtggtggagccaggctgtcttggtgggtgcttgcctctggcgtgttgtgcttctgccctggcctgtctagatgggattagtcgtggtcttctggagagagccttgcctgcccttgtgggttgttttgaatggccatgtctgtgtgcctcgggggcctgcggtggctgtggggcatcactgatgtgcttctatcttgtacagatgctgcagcactgagttacttggctgagagggagggaggggcggtgggtctgcaagcagctgttctgacgctgatgctgcccagggcttctgcacccacggggctgttcttggtgtttcagttcgcttgttccttgaggctgcactgtcctgctggccacaggcctgtgagaacagggctggcctatcctggctctgaccttcgagtgccagtccagggtctgtgtcatcacaggccacatgtgtgtcttgctgactgcgcctgtgaggggccagttggccggcctggccttgtggtcaccatagtctggccggctctgcccctgcccaacgctctgtcctcccgagcctgggctttggtgcacactggcctcctgagtgctgggtaccccagtccactttgggccactgaagaaccctgccatttgggtccagcttgcatttgctcagtttgttttggggtaccccttgaggcccctccctgccttgtgagatcaatgactccccacagaggtgtcctttgtggttgtcatttgcgcagatgggtcccttggagcttgtggtgtgtcctaagtcacgagcaggaggcagggcctctccccagtggtgcttttctgggaagggtttctcccgcaaaggaagagccggcacactcggcaggagtggggcagacccgggctgcctttccccagagcagggcaccaagcgaatagccgcggacctgcagcagcgaggagtcttcaacaggacccaagagtgccagccaaagaggaaagggttggtacgatctgaaagtttgccagctaagaacacatgcttaccaaaaccacctgaaagaaatttaaataaaaaaatcctaccaatcagtaagaaaaagacctacaacccaatggagaaacatacatatgtgactggcaggcatttctcagtgatttggctggcaaacatgggaagagatggtcaaccacattagtctccagggacacgcaaacctggatggtaaggagaccactgtgcacccaccagattggccgaacctcggaagtccaacctgtcgagcctgagcgggatgtggctctctcccagtgcttctgggggagcagcggtctgaatatttgggaaacccgtttggcactatgtgtgacgttgaacatcatgtgccctttctacagcaggttccctgcaggcacccccaggagaagctcgagcatgtgctcacatctcagggcagttctgttgggagcagccccaagccagacacagcccagtgccatcccagagttaaggagcacttcatggcgcgctgcacgcggaaaccccacacagctctggccacggtgagcgaaggccacggcgacagcaccagtgctgcatagcgttaagactgagtgaaaatgacaagtcccgaagactctgtgtgactccgtcccatacagcttggaaacaagcacaacaagccgtgtgtttttcagcaagtgtgtgtatatgtgttaaaacttttaagaaaaaggagaaggagaaaactccagatggaggttgccaggcagggtgggaatgggagagaaagaagcatgttgattgctttctctgctgtccacttcttggagtggggtaggttcacaagtgctcatcacgttattaaaatgaacggatgaaaatacaagggagccttacatgaacaaacgatgaaccaaggatggcatcagttcacttgagccccaggatcccgagagaaaggcagtgaggacgcgcgggtccatcccgaagaaacggccacagtgtgttcctttgcggtttcccattatccgccacggcggggcaggagtacagagggccccgccacatggggacccacagcctccatctttacttcttcccctcatctgcgggcacggggcttgtaaagttggggcctctcctccttcctcccccagaatggctgatgcgtgtgaacgaatgcctggctctggtaggggctgcctgccaggcctatgttctgagcgtgtccaccctgtgtgcctgcatgaggcttcggtggattgctttctatcctcagagcaactaggtgagggcgcagtcaccatgtcccgagacggggagatggaggccgggcgagctccggggcaggcgggcggatgggagcccctgtgatgtgggcgctggcaggctgagcgccacctcatggcaggcagcacccctccttccttggtttctccgcagcggaggccctcagtcctcctgcagcctccaccactcctcacaccacagccagagaactgtgtaggccttcaaaagccccagcgagtctcccgtgcagccagtgggggttctgggtgacacaggttctgcaggctctgggcctgttctctctggaaggttccaggacagagtgcaggatccaggaggggaagggagacttgtccccgtttgtggctggggaatgtgaagcacagcagggtggtggcgttcccccagggcccaggctgctgggaggctcatgattcttgtctctgctccctgccggttctgggaacaaaggaaaccggggaagctgggcgtttccgagagaagtttcttcagaaacccagattgggtgttggacataaatctggaggagtctgcctcgtctcctgggctgtgaccttgtggagcaaaggtggcgggaagcggaagcagaggcaggcggcccaaggtgcagagcgggccagcggggtcctgctgcccctactgtccccaggaaccactgcctgggagcagcttccgtcaacaccccaggccagaggcgaaggcctccctaccataaacctaccataatcccagtgtggtgttgaaattaggatagacagtgtatcagtggaacacaatgagtccacaaatagacccacagatacagacacacatttccaacaaagattcaaagacaattcagtggaaaagggaagtctttttaacaatggagcagagacaattgggtatccactggcacaaaagtggaactgcatacttttcactgcatacagaaccttaacagatcgtagacccacatatgtgatctaacactattaaatttctagaagaaaacaaaatttttgtaaacttgagttaggaagagatttcggtacattgctgtcagagaacgtttgcagagagctctgttcactgcagggggagctgcaggtctgcactgctttgttctcttggggcagccacccaggcgccctctgttcttaggggaagctgccaccctggccttcagggctgactggaggcacatatcactgctttgcgtcctgtccacccgtgcccagctttatatacctgcagcaggggctgtgaggggcgaggcaccagctcagggctgtgtgaccagcaggtggatttagatcctcatctgtttgtgccagcgcctgcccctggctgctgcccaccccctcgtcttctcctgctcttgcttaagaggccaaagtctgactccacggagggcacagcgcattcctgagtgcgatgctcacttggcatctctgagctgcattttctgcagctcaaaaaggaggtgtgagggatgtgtcctttcccggcagctagcactttggaaggcaccacacaccttcctctttgcttgtagacgtggctctttagaaaaacaagatagcgttccccagagcaggctccttggagacagtgggagggggtgatgccacttgttggacatggccattcataagcgcaggtcatggaaggggacggcagccaggatggaaaattaaagcccgcatccctgggaagacgagccaggaggtctcacagctgctccacctgcagcaggcaccggtcttcgcagtgtccacagagccctggcctgggagctaacgactcccctgtagccctggggcttgctgtgctggggagcaccacagaccccaaacttcctgattgctctcggtacagacgaaatgcgcccgagtcttccagcagacgtgggtaatttaggcaagaagcattgtgaacgaggacaaaggggacttttggttgcatgttgttttttttgtccagcgtggctgcctaaggtgaccacgagttctcgttcagctggctgaatcactgcaggcaaggggaaggacaacaccctttgcaaacacgtcctcttttggccttgggaggcagcatgggagtgtctgctgagctgccatggcctgttgggggaggggctggttgttgagcctcagtcccctgcccttgctgtccagcctgctcggggctcactgaggttcctgtgacggccgtccatgttcctcagagttccgcgtgagaccccagaagcagagcaaagagccccagggctgtacgtgggcagcaaggaatgaaacgctgagtcctcaggggatgtttgaggatagagggacagaggccagtccaggtggaaggatagagaacggtcttccaatagcaatgtgttctgaatattttggaacataattaggttgccttggtgaattcccctattttctccagagcacttctcaatctgaggttacatatttacttgggaatttacttacttatggatcgaactgtatccccttgatactgaattcctaacccgcagtgcctgtaaatgtgaccttgtttagaaagagggtctttaccgacgtaagcaggttaagatgaggtcagccctgtcagtcactacatgacagacgaacagcagttggagccacagtgcccaggtgcagtgccctcccttatcctcaggggatgcattccaagatccccggtggatgcctgaatccgcagatagcattgaaccctagacagaaccctagatagaccatgttttgtcctctgcatgcgtatgtgtggtaaagtttaatttataaattaggcacagtaagagactaacaacaatagctaatagtagaacaattagaacaataagccagcatcactgctcttctgatttggggctgttattaactaggatgagggttacttgaacacaggtgctgtgataccacaacacttgttctgatcatcaggacagctacagctgggcgcggtggctcacacccataatcccgtaatcccagcactttaggaggctgaggcaggcagattacttgaggtcaggagtttgagaccagcctggccaacatagtgaaaccccatctctactaaaaatactaaaattatctaggtgtggtggcgtgcgcctgtaatcccagctgctctggaggctgaggcaggagaatcacttgaacctgggaggcagaggttgcagtgagccgagatcgtgccactgtgctccagcctgggtacagagcaagactccgtctcaaaaaaaaaaaaaaaaaaaaaaagacagctacagagtgactagcaggcaggtcaaatagacactgtggagatgctggataaaggatgctacacgtccctggtgggacagagcaggacggcaggggatttcattatgccactcagaatggcaggcaattgaaaaaacttataaattgtttatttccagaattttttacttaatattttcagactgcagttgacctcaggacactgaaccatggaaagcgaaaccgcggataagggggaacaagtgtgtttcccaaagtcacagtgcacttagagggggtcctcccaccccatcctcccctcagacagagactgggtgttgtgtgggtttctactgggtcctctgagagggcagcgcctggggtgaagaagtagcccccagactctgtccaccccctcccgcctctggaatgtatcagggggaagacaggcctccagttccatgagttcctgccctggccccgcccagcaccctcatgcccacccccattctcacttggccagcaccactgaccccagcgcactcaggcacaagcgtgttccctgtgcatatgctgtccgtgcacatacatcctgaaccaggcacacagatgcacacacatacacgtgtgtgtgtacacatgcactgtgttcacaccccagaaacacacctgtgtagacacgtgcatgcacagacatgtttctgtactcgaagtgggttctgagacagtgagcagcaggcacttgggtttttggccaggagcgctgctgtgctaaggctgggagggcctgggtccctgcaggcgtcgcggccttccttcttacagactcgctctaggtcgcccctgctgttgacacccgtgtcagtgcagacacagccctcccagctgggcagccgagtccgaaggctgcctgcgcgctggcccttccatctctgctcctgcacacggctcctctgcagacctacctcatcgctgtcacctgctctctcccgttccagaagccacccctgagccacgggaagctcccagcacctgctcttttactcccaatttgctcctcctcttccgccctcctcttttatttctatttggagaagtatggaaagtcaaaaagtacagtgaataagagcaacccccatattcccgtcacccagaatgaataacctgttatgtgtgtagggtggtgggaggtggtatgcatgtgtgtgtgaggggtggggggtgcatgtgtggtatgtagagtgtgtgtgcgcgtgtgtggtgtgagggtatgtgtgtggtatatgtgtgtagtgtgaatgcagtgtgtggtgtgtgcatgtatgttgtgtggtgtctgcgcatgtatggtgtgtttggggtgtgtgtggtgtcagcgtgtgtgtgggctgtgtagggtgtgaatgtggtgtgtgggtgtgtgtgtggtatatgtgtgatgtgtgtgcatgtatggtgcgtggagtgtgtggggtgagcgtggtataagtgtgtgatcacgtgtggtatacatgtgtgctgtgtgtgatatgtgtgcatgtagtgtggcgtgtatgcatgtatggtgtgtgatgtggctgtgatgagtttggtgtgagtgtgcatgtgtggtgtgagcgtgtgtggtataagtgtggtgtatgctgtgagtgtggtataagtgtgtggtatgagtgtgtggtgtgtgagcaggtggggggcaggaagggatcaagccagcattgttgttacagcactgacttccccataggtgatttccgctgcatcccagacaccccctagctggccccaatttttggaaaagtaagtgatttgggggtgaattgcactacctttaagtgattctgaagtcctcggtggctcagaaatgcagggagatgacattggaagcttccctccctcttgttaggacaaatcctgtgatttgcacaccttgaaagtctggatctgggacctgggcaggccctggcacccccggggcccctgcagcaggtgcggggagggggctggtagggcagtgcacagggatggaaggtagcagagtgggcacaacatcccctgcaatccctagcacattcctgtggttccgtgggtgggtgggcaggacagggagagtcacaggtgggaggaggcctggtcccctgtcctcaccctgcatcagtcctggctggtggcattctgaccaccctctcccataataccaggctcgcccctcccccaggcctggctgtgtccggagctgccctctgggctctgtgggcaatgtgaacatgtggccgccaggaatagcgcctcatatttagacagcagcctcctctgctcccggcctgcccttccaggccctctgcgggcaggctggccatttgtcccaagtccctttcagggttctgttggtggaagggcctccatcctgcccaccccttcagctgaaggcttctgtcccaggatcacaccccacgctcccaacaggactcagagggcctcgtcttccagcctagaagccaccaagttcttttgtgtaaagtgtaaaaaatgtttgcacacccagctatttgtgtgtgtgtgtgtacatttaaaattatgtgtttgttgtattctcattagctaacgtcttaaggcacagtgtgtgtttacggtgaagtttataacagcagatgttaacccaccacgtgaaagtgttaacccgaccatctcagagatgacttcctaatcctgggttctcagactggcctgagtctgggtggcgatggagacagcagtggcttccgggaggtccctgcactggccccacccaggggaccatggaaggattggatctgggccatctgggtctcctctggccccttgtcctggcgcctgggagcaggggtgttgggaggaggaggctaggctgctcccgggcactgggccagggccagggccagggccagtggctgtgtctcagaagtccaggctaccttcctgccccatgttccagaaagctctcctgtccccaggctgccctcattcaggtaccttttcacacttggatgactccaacgggctgattcagtaccgcagtgtcccagcagctgacaatgactggaacttggggaacgtctccatggccagacagggccctgttgaggtggctgaggccacagcttaacaccaacaaaccatttgctggtggtcacaagacggggtgagtagcagctgcacattcctgcagagtgagcaggcattcccagctgggtggatgaaggccctgcagcctggatgtgggagctggaactgtccgctttgcccggcacacactactgcaccccatcagctaaaatgcattgcctaccacggggtcttcacccacccacagctctgctccaattccaggttgggcccttcttcctctggccactgtacctttattttttttagcctttggcatatttattactgtaaaatacacaatacaaattttaccattgtggctgggtgcggtggctcatgcctgtattcccagcactttgggaggccaaggcgggcggatgacttgaggtcaagagtttgacaccagactgggcaagatgatgaaaccccatctctactaaatatacaaaaaattaattgggcgtgttgatggctacatgtagtcctggctacttagggggctgaggcaggagaatcgcttgaacctaggaggtggaggttgcagtgaactgagatcgtgccactgcactcaagcctgggcggcagaacaagactccatctcaaaaaaaaaaaaatgttaccatcttaaaccttaaggctcatccatgttgtagcatgtgtcagaatttccctacttttaaaaacggagtaatatcccattttgtggatggaccacatgtgttcaggtgagtacctaggactacagacagagatggggtcttactatgttgcccaagctggtctcaaattcctggcctcaagtgatcctcccacctcagcctcccaaagtgttaggattacaagtgtgagccaccatgcctggctgagttaatttttgtatacggtgtaaggtaaagatccaacttcacttttttaaaaaatttaactggatttccaattttcccagcactatttgatggaaagactgtcctttccccattaaatggtgttcatactctcatcaaaaatcatctggccatacatgccagggtttatttctggactgttgtattccactggtccatatgtctgtcttcatgcctgtatcacactccattgattactgtagctttgtagtaagttttgaaatatgaaagtgtgagtcttccaactttattctttccagattgccttgattgccgggcgtggtggctcactcctgtcatcccagggctttgggaggctgaggtgggaacattgcttgaggccaggagtttgagagcagcttgggcaacatagagaccttgtttctacaataaacaattttaaaaaaattggccagtcacagtggctcacacctgtaatcccagcactttgggaggcagaggtgggcagatcacgaggtcaagagatcaagaccatcctgaccaacatggtgaaaccccgtctagctggatgtggtggtgtgcacctgtagtcccagctacttgggaggctcaggtaggagaattgcttgagcctgggaggtggaggttgcagtgagctgagatcgcactactcaggaagctgaggcaggaggatcaattgagcccagaaggtcgaggctacagcgagctatgatcatgccattacacttcagactgggtgacagagcaaggccctgtctctaaaaaaagatggaaaaaagttttttaaataaaaaaagattgtcttgactattcagagtcccttgcaattccatatgaattgtagaatggattttaaaatttctttaaaaagtgctgttggatttaggtaggtagttattgcgttgaatctatagattgctttgagtagtattaacatctcaatattaggttttccaattcatgaacatgggatgtcttttaatgtcttttttaatgtctttcagcaacattttgtagtttttattgtagaaatcgttcacctccttgtttaatttctaagtgtgtcattcactttgatgctacaaatggacttgctttcttcatttgttcttgggttgccatttgttagcgtatagaaatgagcttgatttttgcaggttgagtttgtatgctgcaactttgctgaattcatttattagttttagcagatgtgtgtgtgtgtgtaatctttagttttcggtgtacaaacaggattttacttcttttccaatttggatgcctttgtgtgtcagcatgtgtgagtgatagtgtgtggcaggggagtgctgtgtgcgtgtgtgtgtgtgtgtgtgtgtgcacgtgtgtttgagagagagatgggtgaaatcagctggctggcctgggtgctctctggggctatagagcaccactcctgggagtccgtgctccacaggacaagggagtgagctggagttcgggcagcaggttcacattaggggtgttttcatagatgtctctggatttcagtagctggatcccagccaaagcaagtggtagcagctttgaattgttgtaaaatttcactgcttcggaaagacctctctttctgtgtgtcttctccacatcctagtcaaaaaatcatttcagagagaatctcaggaagggctgctgccctgccactgaaatgtgggccagtctgcctgggacagatccctctttccagcaagcatctgctcttctcctagttcagttggaaacttgagtttgtccaagcgaggtggcctccgggagaggccaggtggaagtcctgatgtgagccgatgactttggtctccttctcacaagcagttgccagccacgggcacatgcagattctcgccgtctccatcattcttcccctttggagggagaacccaggagtgctgtggcgccccgcggagggggagaacccaggagtgctgcggcgccccgcaaagggaagctggggcgggagatgttcacgggcggggggttctgccctgccccgccatgggtctctgcgcctgcctggtcagatggtggaactttctgggcacggagtgggggctgtaaccacacttactgcacagttgttgcgagaatcaaatgtcagctgcttggggcccaggagctcggtccaggtgaagtcctttgtcgggggcagatcctgccgtgaatctgagtggatagaggctcgtgcaagaggccaggcctccagcagcccagggttcgcaggtggtctgacacctgccctaacacacttctgctttgttccccaaacccagtgggttgatggaagcatttccgtcctctcccgatgggtacccctgtgctcttcactgcaaacctcctttttaagaaggttgagtcctgagaaactctgcgtacacacacatccccctgtggccacctgtcagggtagcctgggtgtcagtgtcgacagctgggtggcactgcccacgccggacattctgctaatagccaggcagtcatgccttcctcttccgaatcaacctcactcggaagctcaacgcaaaccctgccagtcacccagcagccacagatggatgagtcactgtgataaatgcacgatgaggaaatacagagtcatctccccacaattctatactctgtgtgtgagggagacagagagcggggtgggcagagagacagagaacactggggaggaggaggaggagtccagaaggagctggaacggcctttctgggtgagaacacagcatgtgccagcctggccctgtggaccacaaggctcacggtggccaccttcatgggccttccctggactcgcctggtgggtcctgagggcttgtgtgccccccctcactctgacccaggacggccctagggatcctttggcctcagacctgttcaggcaggacccagcagaaacccctcccccgtctccgcccacaggcctctttgccctttacaaagtttaagggtcactctggagtttttccttaggggctcagaaagtcagccacactcggcgatcagggtcaggcttcatggggtcagacaggcacggggcatgctagggagtgtctagcagccactcttggggtgtgaggagtcctggtctgctcccccaacagcaggcttccagcttctaacgcaaacttgctggctgcagagttggtgtgagatgttcgccttggaaggcagacgcaccctcaggacgtcaggaagtcttggtcagggggattgtgttgggggagagaccaccttagctgaagggggtttccagtgtgtggttctgatctgggctgctgcacaggctcaaggctcacaggacgtccttcctccagggtcatatgggcccctgcactgcaaatcgatggcacccatgggcagcagggcctccctagacagcccatcacacaaaagaccacctgtggctggcccctcacctggaggtggtagcacagccgcagccacactttaccaccggctggggcagagaccaagggccctgtggacggctggtccttcccaggctcccactcgggggagccccagaaacaagcacacgtatactgttagaaacatccaaggggaggccgcgtaactggaggaccaggaggagcattgcggcatcttggggcattccatcctgtgccctgtggcagagctgagccacgtagcagagctgagtcacatggcagagctgagccgcgtggcagagctgagtcggcttctgagagggagcatcctgttccctgcagccctggccagagccactaggccagctggtcccatccggaggagcctccctcaggcgatggctgaggggtcccagggtctctgctgatggtcggtttatccagctatgctgctgaccctgccctctcttgccacccaagggctaggctgcagtgggtaggggtagtggcagggattggtgaggtcccccagggtgtggcagccactggaggagggtggctgggctccggctgccctctcgtggaatcttggcatgctgctcaaccttcagcctcagtttcctcttccacgaaaggggaaaacagtggctcaggggctggcagttggactaaggagctgacgcctacatggtggctactgataacaccacagtcgctcttttgctttaggaaattgtctcaaggacgttcctgttaaaatgcaaatgttggttgtaaattatcccccctcctacctggcaccagctgactcatcagaagggctaggggcatagaaggggcaacagtggggggcacagggaagccctggctcgcagccttggggagatggcactgcccctcagggaccgtgaagctgccgccacgcatcgcccctgcctcagagctgcccatgaggccctcccgaactgtccagccagcctggctgccttggctgggcccctcagtggccccttcacggtgtttgttctccccagctcagccacaacgcctgctggcttcccatggccctggggtgctgttgccctggccctcccttccctcttctctgttcaggttgcatggctgtcatgttaatcaccattcaagggacccttaacttctgtgtctctcactcccctggacttgcctggaaagcctctccctcgaattctccgtgccccgggcagcagctgcagctccagcgcaggcagaatgggagccgagacgagagccccgagtgtcttctctgcccgtgtggccgtccctcaggctccagccacctcccttgctgtgccaggtaacctgtaccacacgtccatcttcaggtcccccctgcctcgggaccttggtacgtgacgtcccctttcctgccaggctcaggccctggcttcattgaggtctccatggcgcggtttcctccctggactccctccgtggctgtggcctctgcacacccaggccaccttgccttatgctgcatggcctgcaccgctgcttgccgtcatgggtattttttaaaaggtgattaataactccttcaccttgaaaaaggtgggggatcaccttattctgaaaactcataaagggacagaatcaagtatgtatcctgcttgtcctggcaaacaaagagttgatgatggaaagttcttcatagacggttagctaataggccgggcgtggtggctcatgcctgtaatcccagcactttgggaggccgaggtgggtggatcacaaggtcaggagattgagaccattctggctaacacagtgaaaccccgtctctactcaaaatacaaaaaattagccgggcgtggtggcgggtgcctgtagtcccagctactcgggaggctgaggcaggagaatggcgtgaacccgggaggtggagcttgcagtgagccgagatcacaccactgcactccagcctgggcgacagagagagactccgtctcaaaaagaaaaaaaaaaaaagttagctaataaatgaagaatgaattaaaatattgccattttgcaacttccagtgaaatctcagatgtgggcattggtcctcaatggctgcagaaattaggaggcgacaggctgtcgggggccttcacggtgtgaggcaggctggccatagatggaccccaatcgatctaatcagaaggacagggacaaccagacgccgtgcgccttcggatgggacgtgctgggaatcacacggccccactgggaccagcctgaatgaggccagcctctggttctacgcactggtgtaccaggcacagaggggaatgtgctgaactgcacccagccacacacaggccatgagacccggcaacaacctggtgtcctgtcctcaacaaatcaatgaaaggaaaaagagaaggaatcttgtctgttgattaaaaaaaaggtagatgagctctagccgccaaacacagcacgcagaccttgcctggaccctgattgtcataaactaaccaaacagacagaggctaccaaaagcattgatgaggcagttgggaactttggtggtatgaaggaattacttattttggggtgtgataatgggatcgtgattattttttagaaagagctgtcatttagagattctgctgcactgttggtggtgcaaggagagatttacttcaaaatacgccagtggtgctcgcgtggggacggggctcagggtgccatggggtacagatgagaggccactggtcaccagccactgtgatgagggctgcagggctgacaggtacagggtgtttagtatactttgctttccgttggtatatatttggcaatttcctaataaaaagtcaaaaattggccgggccctgtggctcatgcctgtaatccagcactttgagagactgagatgggaggatcactggaggccaggagtttgcgaccagcctgggcaatagagcaagaccctatctctatgaagaaaaaattggccaggtgtggtagcacatgcctgcagtttcagctactcaagaggctgaggtgggaagactgcttgagtccaggagtttgaagttgcagtgagccaggatggtgccactgcgctccagcctgggtgacagagtgagagcctgtctcgaaaacatttttttaagttaaaaatcagccaataggtggattattcatcccataatcaccattaggctgaaaaggtaacatttttcctttgggtcacaaaggtcttctgtaaccccagcaaagtatgaacgtaatattacttaaactccaagaagtcttcaaaacaggcagtgttataagctagggtggtttacacaagcagagaaacaaatagatgacgcaaaccctgattgtgtggaacccagtttatatgtttgtgtgttttgtttgctttcaagaagtttaaggtgtttggaagaatcactcaccctaaatcattgattatggttttaatggtttaaggagatgtagttacaccaataagccttaaatgataagaaaactgctttttcaaagttccccttattcttacattaactttattattttttattttttatttttatttttgagacagagtctcattcactctcacccagactggagtgcaatggcgcgatctcggctcactgcaacctgcacctgccaggttcaagcgattctcctgcctcagcctctagagtagctgggattataggcatgcaccaccacgcccagctaatttttatatattttttttagtaaagatcgggtttcgccatgttggccaggctggtcttgaactcctgacctcaggtgatctgcccgccgtgacctcccgaagtgctgggataacaggtgtgagccaccatgcctggccacattcactttaataactaaaacattatagagctgcagggctctgttgaacacgcccagggttggtcccgccttgtgctggctctgtttctccttcttttcgtttggtgttggtgtttctccttcttttcgtttggtgttggtgtttctccttcttttcgtttggtgttggtgtttctccttcttttcgtttggtgttggtgtttctcctttttgtttgctgttggtgtttctccttcttttcgtttggtgttggtgtttctccttcttttcgtttggtgttggtgtttctccttttcgtttgctgttggtctctggctgctctgagcagcacacagtgtgcagcctctgctcctccctgttgaagagggcaatatagcttggatgtcccgctctggtctcatgtggggatgtagtccccagtgctggaggtggggcctggtgggaggagctggatcataggggtggctcctggcttggtgctgtccttgtgatagtcagtgagctctcgagagagctgggaaacagtctgtggcatcttccacctgccacctgccctcccgctcttgctgtgcgacacatgggctcctcctgtgccttccgacatgattgaaagcttcctgaggcctcaccggaagccaagcagatgccagtgccatgcttcctgtgtagcctacagaacctgagccaatcaaaccccttttctttataaattacccagtctcagtttgtttctttatagcaatgcaagaatggcctacctaccacagggggcaatgggcccgtgggggaggggtgtaaaagccaggacctgagggctcctcagtgttgttgtggataaaatgggggatggacatttcctgggtccttgccaccccctgcgaagtcatggggtcttcctgagtgtacaggacgctgcctggcctggcctcagccctcccattccacccgtgcaggacgatgcctacagaagtgtccctgggtcacagcccatcagaaggaggattgggcagtggtgtgggccaagagcctgtctgcacagagatccttgggggctcaagacagccctgcaccccggccaggagctccgtgtgtcactccttttgttggtttatttgtttaagattttcttatttgagttgcagaaatgagattgagaaaggggcgtgctgtggctaccctgctgcatcctatgcaaatgtcgtggagcccggtcacccagatagctgtgtccaggcattggcagccaggccttcccgggaggactgcctgcgggggctcagcccacccagttcccgccagcaggagcaggcagtgcccgccgctgcccccacttggaggttctgaggtgtcagtcacctttttgttgttgtttttaaaaaactttactgaggtggagtttgcatgctacccaagtctcaggtgtacgattcagcagttgtcactgcatcatgcagccaccagcacgatccaccgtcggaacattgcatccttccagatagaccctgtgtgccccttcacggctcatcccgttcctgtcccaggccctggcagccctggcatagctcctgtccctgtggatgcgcctgctctgaatatttcccagcagcagagtcacaggatgtggcctctcactgagcagcatgtcctgaggcttgtctgtgctgtggcgtgagtcagagcctccctcctttccatggccgaacaggtttcatcgtatgcgtgtcctgtgcatctgcccagcagctgatggatgctggggtgcccacgttgtggctattgggaatcaagtggctgaacacgtcacggcacttgtgtttccgcttctctcgcgcagacgtctaggagttgatgtcttttatgaaagagtaagtttttgagtaagttagatatgcccagggaacaagtttcagaaggcacagaagcaactaaaggaagagtgagtagtaaacgtcctactggtgtctcctactggtgtctctccaaaggcggtcattgtcgccagattcttgtgtttcccctgagggcctttccatgtctatcagcagaaaaacacactgcatttgatgtaaaagagatgtgtcttggtttgggttcccctgaaggcagagccgaggcaggggcttgggtgcaggtggattacctggaggtgacccaggaagcccgaggggacaggagggagcagtgggatggagaggtgggaagaaaggagtctgtgcagctgagttgctgagcggttcccacggagagcagccatgctcagttccaccaggcacctccaagggctgtgcctctgaaggacgggaggttgggttatttgtgggaggacctggacccctcctggccgaggccggccccagggattgccgcctccactttctgcggcttaggcaggatctttgtgtagatgtttgcacagatggtagctttgtctgttcacggttctgtacttttccatattcacttgaccatgtatcttgggaacgtacctcacttttttttttttttttttttttgagttggagccttgctctgtcactcaggctggagtgcagtggtgccattttggctcactgcaacctctgccttcctggttcaggcgattctcctgcctcagcctcctgagtagctgggactacaggcacatgccaccatgcctgtccagtgtttgtatttttagtagagacaggatttcgccctgttggccaggcttgtcttgaactcctgacctcaggtgatccacccacctcagcctcccaaagtgctgggattacaggcgtgagccaccacccccagccccatacctcactcttaaatggaacataatattcccttgtatggatatgctgtggtttattcactagtcttgcctagtgatggatctttagatttgtttttttctgtgagaaatgctgcaataacttactttgaaatgcatcagaagtaagatgggtggatggacctgggctaggcaagtgtagtgcgctgtgcatgggagtgtctgggagtgcatgggtcttcactgcacaactggctaaataaattgccatgtgtttgaaaggttcagaaagtaaaacggtggggagagtgctggtctcttaagtgttaaagccccaggacagtggtattgtggggtgcggggtccatcagctcagcttcttcccagacaggcaagcgcagggaacctgagacccctggacccttggcaggagggcacctggaagggccctgggaagccctggagtgcctcaaaacagggagcccagtacagagtgtgattctggtgcccgagcctagggcttggtgagacggcccctcatggaagccccagcccccactctctgccccgctcctgctggatgggagcgcttgaaattcagggcttgtcactgtatccgcaataacaggaacatgtggagacccctcaccacgcatggagctcatcctgctcacagcgagcctgtgggtgcagcccccgcagatcccatgcataggtggggacgtggaagccccaggaggcagggggacaggtcagtgggtggtcctgcccagcctgctctcctgccctcatgtctgctgggtgacttggcagtgtgcagcatcagtgctggtccccctagtgggcccggggccagctgactctgccagggagggggtgggttttcaggctgaataggctgggagcagggacagagaaggagagatgagatgggactggggctgcgtggactgtgcctgtgtggggtttgtgtcacctgctgtgacatgacattgtgatgttggctgcagcagcagagggcagctgggaggtgctgttgtggcggctgcagctcccagcctgggtgtggcgtggcctgagcagtcctggcaccctgagcacccaggccagtctcagccagttgtccagaacctgcaggaagtgctggctccaccaagaaggggagggggggcctggccacccctgatcatggggatagaagaggcagctgcgggggtgggaacccgtgcatggcaggggtagaaccagccacctagaaactgaacaccagacaggcaccaagtgatgcagatttccctgtatgttggtggcacctgtgctgctggctgccttggggctgagttatgatgaacaccactagctcccagcaggacgtgggacatgcagggctgagctggatgtgtgaactgggctttcctcgtgggatctgaatcctttcctgtccctgctatgggaagggctggggtgcctgtggatcgctgggcaagagcaggggggcggcaggtttgcgggtcacagtaacagctgctgagggctggacgctcatgttcccccaaaactcaggtggaaatcctcacccccaaagcagtggcattaggaggtggggcctttgggaggtgattaggcctgaaggacagagccctcatgctgggatgagtgcccttaggaaggagagatcccttgctccttccacgtgtgaggacacagtgagaagacgctcatgggcaagccgcaggtgggccctcgccagagcccggccacgcgggcacctggtctgggacttccagcctgcaggactgtgagaaataggtttctgctgctgagaagccgcccgcctgtgggattttgctatagcagccagaatggactaagacagtaggggaatgggagattcccgctggagctgagagcctgacctgggaacgtgacaggccagcgaggctgtagacgtggccacgcatcactgctcgcagggctcccgaacttagagcacggtgaaccagacagtgatgaagcaaagccaccgccacgcaactccgaggttcagccagcaggcaccgaacatgccagcagctcggtggcacccggcatgctcggtggcatgtcccttcagcggacggggcaccaacccagcatgtgtgcagtgagagcgtgtggtgtgagcacacccggcgggagctcttctggtgctgttgtgtggcggcggcagctgagcacaacgcagatgactttgccccctgcgcacttggtgtccccatatctgtgtccggtgggcagctgtgatgggacatctggagttgctgttgcctgtcacaggagcaagcattggtgggcagaccctagcccagaggaggccccgggggcaagctaccagtctgggggccagaaggtggggagggtgaagggccaaccctcttctggttcctatcatgcatggatttccagtgcccacctcattcctggcggacaccgtactatcaggggttcactgggctttgggaatgcctatatggctgattgcagggtggcctcgggcagccggtgatggggtcaggtcggaaacaggcgaaagagaagctgctttagagacgctgccactagaaagaaggaaaggcagagactgtcagtctggggctgccaggagggagtggtggccagggtgggtgacacgctgctgtcatgtccctgcataggtccaccgatcagggagaaggaagggaggagagctgtgctcctgggggctttcgcgagagctcccctggcttgcctcctccccagggctgggcagggggagcttctacagaggtcattttctcctgaaacccagggcccagagtggcatcagcttgtgagggcagcaggaagggccctgagggctgatggtgcaggccctggacagcctggagagctctcccaccaggaggttactaacctccgccaacacctaggcgacctcatttaatccttacaggaaccctgaggggcaaactgaggtacagagaggctcagcgacttgcctgaggtcacacagctagcagaattttgtggaaagccaggactccaccgtgccctcgacgtctacttgccactttgtcttcagaattagatcaatttgctacaactctgtttgcctagacctgggtggacccgagccgacttcacggagtgatctagttagtgaataaaaaaatggcctccaaaggcttctcgctgttttatggcggccacttttcctgatatgcattggtccagctcgactgaatgtcttttcttctgaatgtgcccttaaccctggctcacgtattttgctggaattttcagcccctgctcctgcctgtgttgccaaatggctgcggccaactgcccagacaaggtttaaagtttctgtctgaagtcttggaaaatgtatcgtttagagaattgattttcagcaaactgaccaatcaaggtcattttgtgaactgactttcagagaattgatttcccatatcctgatccaatgactaaacttttaaaaatgagtctgcaagccccaattcagaagcacgggattttgcatgttaagaaacagttatgggtacacaacatcctgagtgtattaaatgccactaaattgcacacttttaaattgctaactttacgttatcctaatttcattgaaattaaaaaagaaacaaccaacaaaattcatacccagaacatgaattcattccagatggagtaaagtttatggaggaatctaataaagacttaatctaccaaagagataagaaaaaggaccacagccattaaagtaaatacattacaaaaactgaatggcagattcaagacaagaacagatagttatgaaaatggcacatcctggaaatgaaaaatacagtcaccgagacaaaaggctcagaagatgggataggatgaagtacacagttgaaaagagaattagtgaaatagaagagagaaatacggaatttgaccagaatgcaaaacagagagacagagatgacaatttctttcttttttttttttaaacaaagtctcgccctgttgcccaggctggagtgcagtggcaccatttccgctcactgcaacctccacctcccaggtttaagcaattcttgtgcctcagtctcctgagtatctgggactactacaggtgcgtgccaccatgcccagctgattttcatattttcagtagagatggggtttcgccatgttggtcagatggtctcgaactcttggcctcaagtgatccgccaaccttggcctcccaaagtgctgggattacaggtgtgagccaccatccccggcctgagatttaacacctgtgcatgcatgtgcacacacagagacgtgcacacacggcaaccgaaagccctggcagggccggacgtggtggctcacgcctgtaatcccaggacttcgggaggctcaagcagttgccagtccttgggattttctgctgtgtgcgtggggacaccccttgagaggctcctggtgatggggcagtgaccctgctggtagggcagtgagaggccgtggctatgaagccccccggcacgggggctcctggttctgcccttccaagggtgtggtctggatactgctggaacccatttcccgcctgagaaatagggcaggggcgtccatcttgcagagtcactgtggaaggtggagtcaccccgctgtgcccctgagggcatctgcagtaacttcagagccacagcaggcaccctgcccctcctggccctggccccacccctttacctgccttctcctaactgttcctcttctggaagtgcctggagcccaggagaggcctgtgctaggggctcctccctgtctgggctgccatctgcgcactcgctggccccccttcagtgcagacaacacactgtgtccggcagcagggccttgtcctcatcctcgcctgtctgccagtggctttgctgtccctggtctgggcctgactctgacacgcagcccattcttgccttttgtgaggggcagctccggcccctgcgtctttgtaagatgaagactccagaaataaataaatttacttatttatttatttattttgagacagagtctctctctgtcacccaggctggagtgcaatggtgcagtcttggctcactacagcctccacctcctggattcaagcgattctcctgccttagcctcctaagtagctgggattacaggcacccaccaccacgcccggctaatttttatatttttagtagagatggggtttcaccatgttggtcaggctggtctcgaactcctgaccttggatccacctgccttggcctcccaaagtgctgggattacagacgtgagccaccgtgcctggccagactccagaaattaggcctgcaggagattctgggctgtgttgaggcctgggctgctgggcctgagctaggaaccacgccaccacccagtggcctcgctctggccccggcagggacccacgagcaggccctgctgcccccaccatgctcccctggaagtcagacccacctcccctacccagcaagggctgtggccaggcatgaagcctggctcccctggtccccgtggagaccacggggacctgggtggactcctgggcctcaggggtccccatccaaacagtgggagggttgggctggagctcacccagaatgtttggcagtgcctgcagcgggggagggtctttatgtcatcgctcctgagggtcctttggagcctgttcctgctggtgcgtcggcagctcggagccacacgcctctcccgagggtaccctggctgcccatctgcccatgtccctccctccctcggtcaccctaacagttgcacccgcagcacaaggtcccctgaaaacgcacagcgaggccggagctgctgcaggcagggcacggccctgcgggtgtttcatctcgttgtgagagctttccagttggcacaggtagtgtctgctttcacccatccttccagaaacaaggggccttaggccacgggaagagcgcgtcctgcacttccatgcctgtgtgggagtggcctgtccactggagacagcctgtgccccgctagcaagaccacgctcattttgtgagagctcccgccatcctgtggctcttgggcctggaactcgcattcctgctccattctgagggccaagtgatgtggctagatgcagagagatgggggcctgcggcggccgacacccaaagcatccttgatggcttttttttttttgagacaggcatggcaaggtctcactcccgccccctggatctgcctgtgaacacagggtgcccctgggggtgtccagagtgagaacaaattccgtttgggatagagtcttactctgttgcccaggctgaccttcagtggtgcgatcatggctcactgcaaccttgaactccagggttcaagtgatcctcccacctcagcctcctgaggagctgggaccacagcgacacaccaccacgcctgcctaatttttttttttttttcagagacgggaacttgctgtgttgcccaggctggactcaaactcctggccttaagtgatcccactcagccttccaaagctgggtagcttttgattgcagattctagctaggttgcaggacgtgaggaagtgggggtgcagaaatcacagcaacaccctcccccaagggtgctttccgtggccgtgtacacagcccgcctggccggctctgagagcagggacccttctctggatgctccaggccatcgctgtgcaggaacccggtgtgtcgtaagtgaaggacagtcgtctttaccttgggggagacagttgtgggtgcctccctgcaggctgtggcatctgtaattccccaaatgtaggtgctacgttgaacagccccttagacttcaccgcagcaccgtgtggccaccgtgcacagccttcccaggccagctgcagaattccatggaaaaggttttgtgaatgattacaactcaacggtctaggccctcaaccttctctttttagaacagtgccccccattgtggaaatcctcggttcagccactgggaactccccagttttgagggcaggtgttggcagtttcatttggtccaacaccaattccacgttcctgtgcccccttcaacagtctgcgcagcctcccagtggcgcagcctccccgtgactcagcctcctggtgacacggccttgctagccgccatcctgtaccgggcccaggtgacaccgtgggacgtctgttatttaggtgcccctggcccctgccacggggtttcccactttgggggccttgcatctgtgtggcttcttccttgctctcagtggtcacctggttgtcggtggcccgcgtccatcagcccatcatcattccgacttgctgttttgatcgtcggccggaaagccagacagctggccttgctggaccatgtctgcaatgggaattttgaggccgagagggagggcttcaggggcccctgggagtgcaacacgtaaatgggggcttgcacacggggtcgggtggggggctcttgctccgatgttccgggatcttttttgccccttgtagacccacaggtgtgtgtgcaggagccctgaggaggccagaggaggccagagaagggtgagcagaggtccgagggcactgcggtgaggccaggctgcagatggagctggggctcgagctcaggagctggtcttccctgctggggccgcgacgcctgccgctttcctgccggctctctgggtcaaggcctggaaaggctttcttctcgggcttctcatcagcttattggcccatttaggtaatggcacttcctgtccattaacctcagccacactgagatcagctctccacactcacttggcaggaggcttgcaggagctttcctatttggagagtaaaaagagcatggcctctgcagcagccaggaagtggaaagccctggcttcctggttccagagaacaaacaggggatgcggctcccagatgcagccaaaagtgctctggggacggggacagtcggccgggtcctgtcgcaagcggctgccctgttgcactgatgtcctggcccctgagaacacatcagtagggcctggccggaccctgggccgatgccactcttaggggtgagatggggagcctggcccaggctgagacccccaccctccacccaaaacgtgtccgggcctccaggccgtgcagagcacactggaggctcaagacggcacctcttctgtgggactgggccacagcctgtctgatgcctcacttctctgactcttggaggcatggtgctggcctgtctgtgagccccagaccccctcgtagagctcgctccagggccaggcccagcccccttaccgcctctcagccaggctcagctagtggccggctctgccatggggaaggcccggtgtctctctctctctgcctctcccaggctgctgcagcatggccccaagcctgggcgccagtaacagcctcgtccctccagcctgtacaatggctcagcgctacctggggactccctccagccaggccagacatgctgggcagtcagggtccctgggagccccttgacagcgactgacggcaggtgggggataagtagccaagtgtctcctgccggcgggggcaactctgcaggtgtctctgcagcctccccagtaccccatgggtgcctgccccctgagtcccccagggggcacctgcccctttgtcctgacccctgctccttccctctcttctcctggggtggccaggggtcacatgccatgtaaccctgaatcctgtcccagcctctgcccctgaggaacccgcccagcaagccatccaccctcactaaagtccaggccgtcttccatggtcccctcaccaccttgttctttctggccccagaggccatcaccatccagggcacaagggggcctgccccttggccaggtggctgcctgtcctctgaccctgggttgtcgacagggggaggggagagctggaaaccggggtcaggaggatgccagcaggtccgtcactccctgcctggatccggccaagtgcgggggaccttggccagcatcctagagagctggcgcacctcctgggcctgacgcgggcttcctggattgcataaaggctccttctccttacatagccagggcaaaggtgcatgacaactctgagcaagtcaaaacaaccgtcagcagcgggaaacctcgatgaacaaacaccgggagagtggtgagtagctgccaggaaagccccagcctccggcaggaaagggactctgggcggggcggccccagagagaaagtggttagatgtacggacagagggatgacagggctggccaggcagtgctgcctgcaggctgtgcagttggcctgggggtctggagcctccgggacccacagatgcgcccgcaccctcatccctggcttctttcggccccacagcggggcagcagcactgctgtcctagccacgccaggcgccagtgtggcctggtaaaggcctcgtgcattctgtcctgctggtgggggaggctggcctctcatgcgcttgtccttagagggcagcatgaagatgccgcgccccaccggggagacgaggggagtggacccctcatgagatccaggccgcatgaggcaggggctgccatgacaggatactgcatgcggggggcctcatgcagcagaagtggactctctgagtcctggggccagacttcaaaatcaaggtgtcggcagggccacctcctgctgaaggctccaggagaaaacccttcctgccgctcctagcttccggtggcccaggcagtccttggcttgtgtccgcatcgctccagttctctgcctccgtctcacgtgactgtgtctctgcacctttcccccttctcagaacgtgtccttggatctcaagtccaccctcatccaggaggctttcatctcaaaatccttaacttaatcccatctatctgcaaagaccccttttctaaatcaggtcccattctccagttcctcgggttaggacctggacaaatcttttgggggtgtcgttcatcatccaactgcacttggcatgggaaggcccccctcctgccccctggatctgcctgtgagcacaggggtcccctgggggtgtccagagtgagaacaaattccgtctgggacagagctggcagaggccccggacgctggcctcccgagcggggttgtgatgttggaccctgttctcaacaccaggcccacgccaccaattcgtgcttctgtctgggccaggcttccccgtccccctgtcccagtctcaggagggtgtctgcaggtttgtctccctgggggacggagccacgtttgggttccacttcattctccaactgctctggtgctggacagaagctgagcctgcccgcctccatatgtggggttggagagcctggggtaccctggcctcagaggcagtgatgatgggggagggagagagatgggagaggggcctgggatgccattggaatctctcagggcttcatctgagctgtctctgcccccttctagcattcccaggggagttccaggaggcccatggcccctcctgtacagccctccaccgcccagagccttccagcgccgtgtcttccccttggagcatctggaggccccagacagcacccgcctgacgttcagcagagggggagaccgaggcctgcagcagagtgttttgtcagatgctgctccctgaccgggagtgagagggaacccacctagaggtgccagatggggtgccagggcagcgtggcctgcaggcccctcagctcctcacagcccctgcccccagccttcctgggcccagagatccccttgtttaccctagtccagggacagaggctcagatgtcatgcttgaccccacaggtacagggttaggggtgaaggtggctgtctcttcatgtcttcaccatggcttctctgccttcctcctgctcctggtggcttatgtcctgccgctcttgatacgcgactgtggtctgtcctgggatggttatgatgcatatgtgctattgttgtgaactgtaacattgaggtctggccttacggttggttttgattgtcccttctgctcccttttcttattttaatattttaccattttccattttaatgtatctgttgtcttttttggctaaatctcttttcagttttattttactgtatatcttttctaagtgattgcttagagattacaatatactaaacctagcctttcacagtttctgcagatcctgctttgtgacttcgagtgaagtgtggaagcgctggaagcacttagaccctgcctgtgagttgtcatgtatcatgtctgcaaacattaaaaatctcaccagatgatggggtgtgtgtgtgtgtgtgtgtgtgtctgtgtgtgtgtgtgtatgtgtctgtgtgtgtatttttttttagacagagtcttgctctgtcacccaggctggagtgcaatggcacactctcggctcactgcaacctctgcctcccgggttcaagcgattctcctgcctcagcctcctgagtagctgggattacaggcacgcgtcacgacgcccagctaatttttgtaattttagtagagagggggtctcaccatgttggccaggctggtctcgaactcctgagctcaagtgatctgcccgcctcagcctcccaaagtgctgggattacaggcatgagccaccacacctggccaagatgatggtatattttttgctttcaatagtcatacatattttaaaggacttaaaagaaaaaatagtttaaaaactatttacccaggtatccgctatttctgtttctctttcttcattctagaagtgctgtgtttccccctggggtcttttcccttgctggtgacaattctcttctagttcctttacttgagaatgtctttattttgcttctattcctgaaggctgtctccactggatgtaggattctgtggtgacttcttctcctttcattcttcgtgcagcacaccagcatggcgcatgtgtacatacgtagcaaacctgcatgttctgcacaagtaccctagaacttaaagtataatttaaaaaaaaaaagaaaaaaaaaggtattgttccatcgtcttctggcctccctgttttgtttaagcagttttttttgtttgtttgttttaaaaatttctatgctagtggggtgcagtggcttatgcctgtaatcccagaactttgggaggctgaggcgggtggatcacttgaggtcaggagtttgagaccagcctggccgacatggtgagaacccatctctactaaaaatacaacaattagccaggtgtggtggctcacacctataatcccagctattccgaaggctgagccaggagaatcgcttgaacctgggatgcagaggttgcggtgagctgagatgacgccactacactccagcctaggcgacagagcaagaccctatctcaaaaaacaaaacaaaataaaagttctctgcttattttgcacctaatttctgtttagttagtagagttttaagaagtagatttaggtttgcagaaaaactgagcaggaagtacagagaattcccgcacccgcctcccccacactgtccacagcttccttccctgttatgagcacagccatgccatgggacatgggtcacagctgatgagccagtatccatacattgttactacctacgtccatcttttacaacagggatcactctgtgtgttgtacattctgggcttggggcaaatatataatgacatgtataatgacatcattataacatcatacggaatagtttcactgccctaaaaatcctccacactctgccaattcatccctccctcctcccaacccctggcagccactgacctttttcccgtctccatggttttgcctgttcccgagagttgtatagctggagttgtatagttgtgtggcctttcccaggctggctgttttcacttagctgcatgcgttcaagcctccacagtgtatttgctggcctctgtggttttgatgagaaatcctgggtcatttgaattcctgctccctctgtgtgtgtaagctatcatttttctctggctacattcaagatttttctctttgtttttatgttttagcagtttttaatgtgtgtaggcatggttttatttgagtctagtctgtttgggatttgctgagctcattaaaactgtaaattgatatgttcccccaaatttgggaagttttctgcttttatttcttcaaatatttttctgcaccattttcttctctcctctgggcctctaaggacgtgaatgttagaccttttgatatcattccacaggtccctggactctgctcatttttttcagtcttctttttcttttcttttttttttttttgagatggagtcttgctttgccacctaggctggagtgcaatggcgtgatctcagctcactgcaaccttcgcctcccaggttcaagtgattctcccacctcagcctcccgagtagctgggattaaggcacccgccatcatgcccagctaatttttgtatttttagtagagacagggtttcaccatgttggccaggctggtctcgaactcatgacctccggtgatccacccacctcggcctcccaaagtgctgggattacaggcatgagccaccgtgcccggccttcagtcttacttttctttctattgtctagattggaaattttctactgatccatgtataagttcacagattctttcctctgtcactgacattctgctattaggtctgtccattaaaaaaaaacaatttctcaggtatcatatctttgagttctgaaatttctatttagttcttttttgtagtttccatttacctactgagaatttctgtccttccatctgcttcactcgtggtttcttttaccatgtggagcacagttgtgacaggtgctgtccagtcttgacctaattccagcacctagagcatctgttgactctctctctcttgagaattttgtggctctttgtatgtcaagtaatttttttttttttccgagacggagtcttgctctgtcgcccaggctggagggcagtggcaggatctcagctcactgcaacctccgcctcccaggttcaagcgattctcctgcctcaacctcccgagtagctgggattacaggcactcgccaccacacctggctaatttttgtatttttagtagagacagggtttcaccatgttggccaggctggtcttgaactcctgacctcatcatctgcctgccttggcctcccaaagtgctgggattacaggcgtgagccaccacgctcggcccgtcaagtaattttgaattgtattgtggacatcttgaatactatgtagtgtagattcttgttaaaatctgctggaaaatgttgatttctgttcattgttttggcggcagtcaattcagtcagagccagatctcaagttttgtcttctctcctgggggctgtggtctccatctcattgtgctctcaaggcttttcctgggtggctgtgggtgcgtcccgaagccagtgttgtctctgtagggtgctctctgcccctccccaagtaccatgaagtgagagagcagcgagcgggccaggcgccactcctggaggacagccacgatgctcacctggacctgggccccacacacctctcatggtacaaagctgggggcctgcaggctttctgctgcccgcctctccctgggggttccagcccataccccaggatggttgtagggtatggccgagtccatcatttgctcctggtattggggggaagtgccatggtggcctctggcagccatccttgtggcctgcctgcccttgccacccttgatgtgtatatgtttcaatatagttgcatagtggttaaatattcacttagccaccttctgctcctgccttgacttcccacacaggaagatggcctgtaccccaggaagatggcctgtactagtcagggttctccagcgaagcagagcctataggagatgcagacacagagatggatatagatacctaagagaagaggcattattacaggaattggcgcatgcagttacagaggctgagaaattccatgagctgccatctgcaagtgggagaaccaagaaagcctggggtgtaattccatccatggcgcaggcctgagagctgaggccagtacctgagctcagcaggagatggtgtctcagctctgagagccagctctcccttcctctgcctggggtgtaattccatccacggcagcaggcctgagagctgagcgctgctgtctgatcccaggaggagatgaagtctcagctctcagagccagctctcccttcctctgccttttttgttctagtcaggccctcactgggttaaatgattccacccacaccgggaggggcgtctggcttcctgaggccagttcaaacgctgatctcacccggaagcaccctcacagatcccccagaagtaatatctccccagctgtcatgcatcccagccccagccaggaggagacagagctaaccatcacagtggaccatgacgaagtggctctgctgctgcttcacaggtgccgcagacccctgggaggcaccaacaccccggatcgagaagcccgatgggaaagaatgtctgggaaggacgtcatgcccgaggcttgcgtgacagtttccactcacagtgcgctcactctgaacctctgtgcacacgatgggcctgcatctcttcccactatctgctaggaaacacgagggtgagtgatgagtttttagggtggagctggtcggcagtggggccccgactcccagtccagggctgcttctgttgcaccagtgtcccccagtgacccctgcacttgtttgggtgctggacccctttgagaatctgatgcacgacagggaccatttcccctggaaaacacacgtccccacccttcttgtatgcagaatcatgggatttgccgcagtttgcacccaggcctgtgcggatgccccccgactgcccgagatgctgcacctgccactgctgggggtgtacctgcctatgcccactcacaggggcacctccagggtagctgcctggtgcaggcattggctctaagcagagcagcactatgggcccatctggggctggctcttgcctgggcctgtgagcaccatcacagccagccgatctgggagtatccagggtgttcttgtcattgcggacactgaatagccattggtgggtggcgatgggggcttggaagccgagcatcagtggcaatgagaagcaggccctgtggtttaattccgaagcacatgaacccacagagccgccaacagtcgttattcggcaggagggggtacagagacagcagcctgcggagcgttctaggcaggacagggcagcaaacctgacatgcggagctgggggcaggggtaatggggccagggggtaatggcaggtgaggccatggcctagagggttgccatgcttggtgcaggggaggagaggcccaggtgtggctgcagtggcagcaggagtcagtgtggctgtgcccagtgggatgttgtcagagaatggacctggctgctgggaaaggtgattgtgtttgtctgagccacactggactcttctctgaccagcaagcacattctggagatgcggggcagagacgaggcctccgtgagaacctttgaggtgtgagggccttgatctggggtgcagcctccagctttctgcttacagagcaggacctgcaggagctcgctgactgcctgcacagtggaaggaagacctgtttcttttactttccttgaggagaaaaaattaaagttctgagcaaacgcatggcaagggagctcttgctttcctctcttggagttctaggcggctggcgctagtggcacgtggaactggtcacgcacactgggtctcgaggccgtctcctcttctgtaagttgaaaggttggtgagaacagaggtgtggtgtgctctgacagtggctggttgccttgttagtgcctgtgctgccggcctgccacgcctccagctcttttagaggaatggcctacctttcaaagaggaagtgccacagaccagtctagttccctggagccacattcccacatggcgaaggtgggaagccactgcgttatgactctgtgcgttcaccaccatctccaccccgcgtcatccctcgtggcgtacgtccctgcctggcctccccaggcactggagctggcacttcttgtctaggtatctcaggcctggcgaagctcctcggctccggcctgagcgacgacctgcaagcacagactgggcgctgagcccctgcctgagctgagtcagggccggagagccggccgagtggcatgctcccgagagcacagctggctgtgcagtcagggccttggtggacacgctgtccacctggcatggacatggggacatgaggggcaatgcgggcacatgcaagagcattcccagaacaaatgcatggtcgtcccccaaccccctccctcggagtccagctgctgccaaatgtcccttaaaaccctgggtgggatgccagcaagagccccgggaagcttgatgatgagactcccagcctcgcctcccggcagtctcccccgccgtggcaggcctgggctggccctggcatctgtccaggcccctcggtgactctaaccttggccaggtttggggaccacaggggactctggggccctctttgcttggtgacttggagttctggcctggcacccccaagacagcaaagggcctggcccttccggtgtcattgctctcctgggtcccaagcttgcgtgtccccgcgggccagggcagggctgcatgccacagaagtcatcgtttcatagaagggaagactaggaagtcagctgcacccaggtcaagtgggtctgtgcgagtggacgtccctcctcttgctgtctgcgtgggtcacattgaccagagtttgttaagcccgggccagaggaggctcactccctaggctgggaatgagtttggtgtggcttcacacacaccgcactcacacacacaccctctactccacacggtgataagtgagtggctggagcaagccgcaaggagcttttgagcgcacaccagagctgcttctgctacctccaggcctctgatggctgcggctgcagacacagccagcctcgcagcatgtaagagtgggcaaggatgacacacgggcacagagagaccaggctgggcttcaggaagcaggtctgcgtgggatggaagtgcttagaaagtcatttctggaaggccgacaccagtcggcactccctgagcgaaaggacttgggaacacgtggatgcacttcttgtatctccaaggaaatgctccctgaggatttgcgacgtggaaatgcaacgggctgtggagtgctgcgcaccccgcacctcgagcagtggtttagctcagctcggggtttgtggcttcagggggtcatagtccacaggagtgccagggggttgggcgggtgggacagaggaggcgagaagtggttgcggacactctgcatgagcaggacacgcacacaccacacacacacataccccacacacatatacacaccacacaccccatatacacacaagtacacacacgaacataccacacaccccatatacacacaagtacacacatgaacacaccacacacacacacaatacggctctgcaaggaaacgtgtgaggggtgtggtgtgtgtgcactgtgtgtgaggtgtgtggtgtgtgtgaaatgtatgtgtgaggtatgcagtatgtgtgtgaggtagtgtgcgatgtgtgtgtagtgtatgtggttgtgtgaggtatgtggggtgtgaggaatgtattgtgtatgtgtgatatatactgattgtgtgtaagggatgtggagtgtgtggcatgtgtgtaaggtaggtgtgtgttgtgtatatgtgagctgtatagtgtcgggggggtgtgaggtatgtggtgtatgttatgtttgagatctagtgtgtgtgtatggtgtgtgtgggaggtatgtggggtgtgtggtgtgtggtgtgtatgaggtatgtagtgtgaggtgtgtgatgtgtagtgtgtggtgtggggtatgtggtgtatgtgtgaagtatgtgttgtgtgatgtgtgggtgatatttggtgccgtgtgtgtggtatatggtgtgtggtatgaggtgtgtagtgtgatatgtgtggtgtgtaatatgtggtgtgtgtgtgtgtgtgatatatggtgtgtgtgtggtgtgtggtttgtggtgtggtgtgtgtggattgtggcccccatccccatcttgcggaagggctcagaccccggcccctgtgcatttactctctagcttctgggtgccaagctcaggctaaggggatttctgacgggctggacgtctgggcttcagccctgaaataagagttttgagaaggaagagggcagcgctggaaccctcacccgtcttttaatgaagggatttggctaagaagaaatgccaagtacttccgcaggtcatcctgaggtcaggatgtggtcggtgtgtctgtccctgagcagtcagacctgatggtggctggagctccggaaagctcgggacccctctagcgtcctaggccttctgttttccttcctgctccagggggcaggactggcagattcaaggaagctttcaagaggggttagaaagaaggggtgtgctccaatctgccagcctgatgtccttcatgggaccacaggccaggaactgaggttccctgcgaggggtggatgctgcgtctgtgagcctccccaccttcttgaaggcaagagcgcccagaggtgttcgcttttggtgtcggcctttgagctggagcctggagctgtttctctgaattccttctgcttgtttccttgtgctcttgcctgggaagaatgaaatgaaaagaaaatgcaaagcccagaacctggcagagatgggatgccccaggccggagtgggcagggcggcgctctcagcccactctcagcacaaacgctgccccgttcacctctccgcgcttgttgccagagcgtgtcaaagaccccgaagaatgaaatgacttcggaagaggaggccacacacccgtgaaacaagccggatctgcagcggaacattctttacgtgttttgggacatttcaaagactgatggcgtgctgcctttgtgatgtgtgatctgaagattccatcaaagaaagtgtgtcctttgtgtgaaagttgtgattcttggcatcttcgtggttttgggtcctgaaaaaataccacgagggccctcccttgtggcctctgcaaccataggaatgcgggttttggaagtggcatttcaggcacggccaagtaggaaattagaagagaccctaggacttcgatgtgggtggaagtaacagcagggtggtcgggggggggggtgcctcgttggggaccctccagcaccccactgtggtttctcttgggggtcgcttggacagactgttggagggctttcgtccccaactttctattggcaggtcatttttcaaagacaacccgcaatgcagccctgtggttctgcctgttgagaacccagcattgagaccccagggtcgacagacagtctgagaagactgtaatttgcagaagaatctcagggtgatgctggcagggcaggggtcagagctagctggggaccagggttggctgggcacaccgtcttggtggctggtggtcgcagctcatggaagtctgccagggcgcgtagccttggacctacaagggcagggttctagaagggtggtctcccagcttttgtgaaaaccctcctttaacaatcaaaagtttgagtgcacactcccgatacatgtacacacattgattttttttttttttttttttgaggcggagtctcactctgtcacgcaggctggagtgcagtggcgcgatcttggctcactgcaacctctgcctcctgggttcaagtgattctcctgcctccctcctgagtagctggagttacaggcacacaccaccttgcccagctaattggtgtatttttagtaaagacgggggtttcaccatgttgaccaggctggtctcaaactcctgacctcaggtgatccgcccgcctcagcctcccaaagtgctgggattataggtgtgagccattacgcctagcctgatacattgattttttaacacttgtcaaatggactagctaatagtaaaatattacatagattatagaatatgggcattttaaatacttttaaaagatgagattttgaaaggacagtattaatattttcctcctgcgcctccctggggcctgtggtcctccctttgtttttgacccctgggctagagttagaagacaggaaagagtttggcctcactgtaaggacaggcttgtttttgtgattattgttaatttttggccatatacctttaactttttatcatacattttttctaaacatcaagaacttgagagggagcagtatcatggcagccccatctgacctataagccttcttccctcccccgatccactgccccttacccctcctctccctggagtcttttaaagcaatccctgaccttatttcatcagagaaatacctcagtgcgtggctgtacagaatagggactcttccaaaaaaaataactgtgctaccgttatcacacctaaaacacgacccttgaattctttgtgataatctgctagcagtgttgaaatttccctggttgtctcctgtcttttcagagttggtttgtttgagtacgaagtccaaggctctctgtgactctgaagtccctccggaatgcccagagcttccgtcccccccacccccccccaacacacacacatcactcatcgtttatctgttgaagaaacctggtcctttgtttgtcctgtagaatttccgacactctgggttctgctggctgtctctgtagtgtcgtctaccatgttcctctgtcccccaaatcctgtggctctgacgatgatggtgaggtggtggagacgccctcacagctgggccaccctcccgtcgggagacacgttttgtcagttgcttcctctggagtccttgtgagtcagactcctgagtcaggaccaccaccgtcaaggttgccaccgccgcctcctgacacgcgccaccaggctccgcgctcatggcctggcctggcatctcaccaggcttttcaatggactagagtgcggggctgctctgcctgtggcaagggttgtcctgctgctgggcacaggcccagagaggaagtggcagaagctgggcatgggatgctggtccttgaaggagtgtgtgggggccactgggttgaacgcagcccgctgcagccctgtgaccttgagtgagtccctttgtggctgggtgggaggacaccaaggcacagactgaggacaggccctttcccgggctctcggctggcctggttatcaccaacaggacctcgcaggcccttcccctccacgggccccaagccccatctgtaagaaggggcagcccagcttgtttcagtgaatccaagagaaacactagtttttgtcctagaggagaggcctggcatgtcccttcgcactagtgatctgggagggagtggagctgacgccaagaccccacgaaaccaccttctttccctctgtacctggaaagggcttggctcccaccacctttggtgggaacagccattcagagcattttgcaaggcctcattctttcctggaatcccggtggagaaccagctggctgaaggaatgatctggagaaaagagttgtaggaatgtgtgtgtctgcctagaaaatgaattgactctgaaaaatgggccgtaggccagaaatagcagctctcctgccctggtcactgctgttaggaggacagtgtggcatgtcctttcactcttcgagcacctttggctgctaggactggtgggggccccctctacaggaggtcgtcgtccctctgggcccaccgctgggcacggagctcccgtgggcaggtggagtggacacggtgcctcttaggacttggggtcctgatcagctagccggcaatcccccgcggcaaagtccacccctcactgaaagccaaaagcactgcttgatgggcaggcctggctacgggagccgtagtcatcacacacccagtaaatcacgctcctggcacctccacacagagtggcgatttgtcaaagcaaatgcaagcaaatacccacccactgccggcctggcaggctccccaggagtcggatagctggggagagcctggacacactggcagctctgggagcccggggcacagactgctcagggcaggtcacccctaccccaggagggggctgtgtctgcaggggcccagaaggagactcagagaggcagctggaaacccacaaaactagacttgttcagaaaatggccaagcccttggcctaattattctccttttttcttttaagttaaaagactactttttagagcagttttcattttaccgatacatcgatcagagagtacggagcttcccacattgcctcccgcaccccatagcaggcagaggcaccagccaggcgccatcctttacaagctgtttcagcaaaatgtccctggtgagctaagttctttctgtatagaaaacatgcggtccccgcagaggggattgctgggggttcacacactgaagggggcgccccttccttccccgtccatggtgggcgcatgcaggccaggagctgcgtccctccccgagacggggagggggacgctcgccccctgaccccaccgtggagtagccccctggtggccatgcagggcccacaggggctctgttcagtcggccgctgggcaaggcaggaccgaagatctagcagggtcagcaggtcctggagggcagacagggtctcaggcctggctggtgcacagccctgcctccagagcaaagggaacaccccgggagcagtgtgaggccaagccggaggtggaggtgccgcagccctgcagggctgagaatacaagcatcactaacccagtgttttcacaggcttcagccatcttttttttttagttttttagtttttgttttttttgctttttttttttttgagacagagtcttgctctgttggccgggctggagttcagtggtgtgatctcggctcactgtaacctctgcctccggggttcaagtgattctcctgcctcaccctcccaagtagctgggattacaggcatccacaaccatgccaggctaattttaatatttttagtagagacggggtttcaccatgttggccaggctggtctcgaactcctgaccttgtgatctgcccaccttgacctcccaaagttctgggattacaggcgtgagccactgcacccggccttcagtcatctttaaaatgctttttttcctcttttgattcagggtcttaatgattaagtccaggcactccaaggacgattaaatatttaaacagcagcttccctttgaaggtcagcccagagtgtggggtgtgtgagacggccaggcgcacagtgtgggatgccgttgctggcgggggcgcgggcccatgggggacgggacaggttcggacgtggggagggcaagggggcccaggagggttcccactctgcagatggctggcctgcctctctctaagagctggctctacacttgcttccaccccagggaaggaaatgaccgcagaagggagtgcaccgtgggggcaggaggtgctgcggccaatgggcagtgctgggagatgaaaccaacagcggcgattgccccagaaagaacttggcgctgctaaggcaatggcggcccgaaagaggcccctgacgcatgaggagcggccgccgtctccagccccaggcctccctcccctgtgtttcccgcagccccctctggagtctctcccccgccccgcacgtgtagggagaccccgggaaagtgggccggttataattgcaaaaaataaaccgtcagtagccacaatatcttataaacgtaaaagtaatctgaaaacctacttcagttagagaaagggcgtttgaatatttcctgtttaagacacagaccccctgagaagatgtataaaggacttgggctgggtgtggtggctcacactgcccacaccatgaccttggacccccggcctccggaactgagaggcgccgaacgcctgctgttcaagctgcaccgtgatgggcacttggttctgtctgccccaggaaaatgagcccagcgctctccccaaactcctttgtcctgaacttctttccagagccctcagccctaatgggtggtcccctagggtcctcagccttcagactctaaattcccgttggaaacccacaggcagtagggccacgcccaggcactcagccgctgtgctgctcccacggggggcccagcaaacagccagaggcaggcccggggagagttccagggggctgggagacaggtgggaaacctgccactggcggagcggttggtggaggggttggaggaggggccgacagggaaacacggtccacgcctctgtctgggggctgtcacctccagggctttgagcctcaccagcgttccgccgcatggcttggaaggtgttgcttttcctccagggagctcaggcctccgcaacatgaggacactgcgacccggaagcactctgtgccgtctgagctgcccgcgatccagtccctaagagggaccatcggcaggcggcttcctggctcttggggtccgcacaggcctgtggtagccctgtgagtgtcggctcctgcatagaaccctgcctgacttcccaggaagagggtgctgcctcctggggactctcagccaggtggggaccactgactgggtggggcggccacgctggccccattgctccagcagggatgtggaacggtgccagcgctgcccggccgcttcctccaggaggctgggtggctcccccactgccgtgctgctgacccagcccctcgctcaccctcattcttccacaggggcggccaggaccggaggccccgtctccagagtggtgggtgggaagaagggagagggccgagggtctgcagggtgggcctggggagtcgagctaggtgtgcgtgcaggtgcctcacctgccggccctgccctgtccacaggaggaggccatgagaaccgtcaagaagttcatggactcaggaggacgtcgtgagcagtgctgaggtcatggaatgtgggctgggaccttgtgtttggtgacatcctgtaagtactcggctcgctcaagctaactgcccggctgggatcaccgctctaggaggactcaagagttcagatgagtggcccaggggcccgtcagtgctgtgcacctctccccccatgggtgggggaggagcctggggacttggccagtcctggaggagccctgagaccaggccctgtggtgggcaccacggcacggggaggtgcctggagggctggagcccacttggggggccatggtcagtcagggctgcagaagcagagaaatgcgggatgcccatgctggctgggactcgcccactgccctgcacatggcgagtgagggagagaggcaaggcacctttccaggggtgcatgggaggctgcggtcaaaggtcctgcacacccgcatgcgtgctcacatctgtagctgcagacactgacccccagagacccccgagctcatgtggggctggtgtaggcgtggggtggacgctggggcagtgtgggctcctcctcctcctccatgcgcgtgacggggtgggggtggcccctccccttgccctgggagctccggccccctccccaccctccctgtggccccagtagacagagccctggcccctgcctcgggccaggtttggcagagggggccctggctggaaactggaggcagatggaggggagctggggttgcgggctggccgtgtcccctaacccctacacagcccagctctgctcctgctccgcctgggtgttctgcaggctggggtggaggtgctccaggactgccccacagcccagggccacacacccctggagcgatccctatctctgtctgcgccctggcctccttcctgccaagaccctgactgagtcagtaggcttgactttcataaactggccaacaagattgagaccacacttggagtggaagatggggccgtcttaagcccttgccccctgcacgggtcagcctgtggccaacgtcctgggccgagcctcctcctcttgctccacgctcttcccaccctgagaggggcctggtctgggtgggtctcctgggacccccagtgttcgaacatgacctgaaaagcagaaatggaggctgaagccttggcaaggaggccagcacttcccaatctcaccttccacagctgatgtgcagggccgggggagtgttggtaatcctcccaggacacacatgtctgcatttaagggtgtgcctgacatgaaaggaaatttattcaatgatctttgctaaagaccggaaggggactactcaggaccagtgcggtgggtgctgggaccagggcagtgggattttgcagtggtggagagagatttaggctccactctgaatatggctccagcgagtgggatttgatagcccaggagcagagtggggtcctcggatggaacatcactaagaacaaacagcaggggtgggagggttctggctgaagggaggcggggtcatccgtcatcacctgggtgccagaggacgagcatgctgccctgacgaggatgatcagatacggggcggggcagttctggctgaagtcacttagcagtgttcttgctaaaaccggattttgcaaggaagtgtgcaggtggcctagaaggctcaagggcctgatagagtttggccaagcaaagaatctcgtcactgagaattagaatcaagggcaggtggctaaatagtgccttgtggattctctccggcttttgcggcccctccctccacatcctgctctgggtagcccctatcctgcagccatgacccagattcctgaagaggggatgactatacaggggcctggatgctgggtgccggcctcaggggcgggaggcaccgggagaggcctggccggagagccgccgggacccaggtcaggtcaggacccagtgtgtagcggagcttgggctcatgaggtcagagctggagccactgcacatcgtctcccagggccggggctcccagaggacatgcagtgtctgcagttttctggggtgcccccgtcctctgcatggcactctgcgtgttgggggcctattgcgagctgctcatcctggcttcttgggagcagtgtggcctaagcaagggaggctgcccaggaccggcacctgtggggcggggctggtcgcagggtctcggtccctgagggctgattcctgctgaatgcttcaatggccaagggtggatccctctccttccagcctgaggctgtttcaggaagaaacagtcaggcctcggcaggtttccctgcccaaggggagagtctgaggaggggctgactcggcaggtggagcagggggccactttcatcgagtttgtgttcagaactcactccagggtccttttcttttggggccaggcaggcagcaccatgtgggacattattagcaaggagaggaggggcccaggagagctcacagggcgttttgggagctccgtagataggcaggtcctgaggacttttggaaaggatagaacaaggtcccgggcagctttgtggtggttgagagcgagggaggaggtggcctccctgagcgtggatggctggatgcatgccccagacccaggggcagaggctgagaagggaaggcgggagcccagggaccacacttggcagggtggagggggcagggggagccacttgctggggaaacttcaccggatgatctgggctgaggacgcgcgagtgtggaagaaatggtacctcccccatgccagatgctgcccaccaccggcacagggtcagagttggggtcagcggggcagccgtgtgcccccagtgggagcttggaggtcacggaggaaatgcgagaccagatgcaggcaggggagtcctccggagcctgcaggagggggccgctggctcaggggcaccgggagacccccacatggacagggtggaaagggctttcttcaaagccaggatcttgtctccatcacagcgtcccagcaacgcattgggagtgcttgctgccaggaggctccccggtcccgcagcagcccctcagcggctgccctccaaggaaggggcgcacagacactccaaggctccacagcgcgtgggccaggggccggatctacccctggggcagtgggactgagcgtgagcccagcgcagcccctctgactgcgtcattgttaggggccttctcggagctagcagacctagaaccaggcctagggggtgggggcgtgcctggatgtgcactgggggggtgtctgaacccttagttaggactgcgggccctcctttccacttccttcagttcctggggtctggggcatcctagccatgcgtggggcctccctgctgggattggagaccccctgacagctggggctggtcccagcatcttcgctcttcccccaggaggacttggacgcagggtcttctctgctccccgtcacacagagggtggcacacccgatgggaactctcatttatcaccaaaccaaaagatggagaaactgacagagaagggctgcaagcagctacggcagggcggtgtgtggaagcagatgggatgggcagatggaggcgggggccagcatcgctgccttcttgcccctcccagaggaccccaggtccccagctcgggcgccccacccagactggtaacgcctgcgtctgctgtttggcaccgggagatgaatcacttgcttttcaaattagaatcttccttgctgtcagaaatgtttcttctctacaaggaaatggaggtgaaatttttatatgggaagggtagctcccttggcgaattgcagggcagcggagggcgggttcggggagccgagtgcagcccgaggtgcagctttcaggctgggaggaagcagctgcttccggctcctcgggacacgagacggggacagcgtgtgctcggcgggtgggagtgacgctgcccacctgcgggcgtctcctggggaacggggtatgtgggctgtgtggcggtacggagcccagcgctgataggaggctgcgctgtcaggctgcatttgaccatttatggaaccaggccatgaggaggccctgaattagaaaggcatccagacccaggctgcagcctcaggccgggcactgtcccctgcatggctccggcgtcccagcttggtgttatcagaacacagaggttgaggctatggctccatctgggctgttagcacagagaaaaaatgcccaaatgacttggtaaagggcgggcttcctggccccatggctgcacgggtgggctggcttcctgtgtttgctgagatttctttgaggcagccccacggtagagtccactctgggtcccggccctgcgctgggcgctgtgctgagcgcctctgtggctgccatcatctgattttcagcgcactcacaggcaggcgccaggcttcactttaaagatggggaagctgagtctcagggaagtggggtctgtgccagggtcttagcaggacttctggggttgctaggacccccacggggctgggctgggggtcttcatgccaggcccaatccctttcccatagttccccccgccggcactacccaacatgtggtctccggtcatctcgtgctgtctccacccctccctccgcttctctgctggagttgtccctgtcaccttaccccagagccttctttgttcttacagtcccaggcggagggtacctcggagcacactctgcagcctccggctctccctcctaagtccacctgcccggccgattgggctgtgtggtcactgtcctcaagaccttatgtgccatgagggctcagagccctgagcctcagcacaggaagtgccacccaggcagccaacacctgctcagcgggcggatggccttgccgactcggctttgctcccgggagcctcctggagaagaagccacagggagacggacagccctgggcggctccagcttgccagctccacatccaaggtcctccttctggggtggggttacaatctgttcaaagcatatgcccagaataacatttttgaaagtctttaaaaatggggtaaagctgacgtaccacgaaagacacaaatcttatctcgtgctcaggtctttgcgtgtctgcgcccgtgtaaccgccgtgcgtgtcagtgagtccctccaagagcacgccagaaccacagagaacccctggtcccccccagggactcccccgagtcatgacccccagaggtgacctctcctgtgatctctgacttcccagcctgtgggggtcttggggactgtgttctccctgctgttagagtacacaggccctttcttttcatggctgtgcagggagggagcgggagacaccacgggttgttccttctgccgagggacactggtgacttcaggttgtctttctatggctttcgtgctggctctggtgggacctgcgctcagcagcagacactggccctgggggttgtgtgaagctttgctgctattccccacagggtggggggggccagttaccctcccccatagctgtggggactcccgggacccttgtcgtcagcctttgccatctcagctcacctggcgggggtagaataacgttttgcaggaaagttacagacttcctgtcagctcaactctgcagaagaggagtttggtgggaagtttttccagagtcttccctcggcctggggcacaatgtcactgaaatgctggagcaatcaggggccagccctcaaatggagtcctcgcctccccaccgaaaggccaggcccgttcagagaagaccccgtggacatgtggggcgtgcaggctaggcggggtggggctgagtggccaggtgtcaggcagggcctttgggaacagaaggtgggtccctagggaagtggcggtcaccgtcagcctggcgagcagtggcccttgtggaaagggggcttcggacgtgctcgggagatgcagaaccccgtctgtgggagagctcctgagagttaggggccaggctcagctcccaaggctgccctgacagaggccacacgctggggagctaagatgctgagcctctcacagctctagagactggaattggggatcagggcatcctcaggcccctgcccactctggaggcccgaggagagggtcctccctgcctcttccagctcctggtgaccccgggcgtccctctgcgtgcagctgtgtggctccagtctctgcctccattgaaacgtggctgtcctccctgcatctgtggggctgacttccctcttcttacaaggatgccgtcattggatgagggcccaccatactccagtgtgagctcaccctaacttgattacatcagcaaagaccctatttccaaataaggtcacattctgaggttctgagttgacatgagtttttaggggggcctgctcagcccaggacagtatgtggtttaagaaagggatttccccagaatgatctgcctgccgtctgcatccagccgcagaccctggttcctgccgtctggtcagggctggccctgggtgagctggaaccctctgtccctgcacccccagcactcccacccaaaatgaactttggggacagacatcacagcttagggcacccgtggggtcttcagaggctgagctggtacccagctcgtttcctccctcacagatgcagccaggcagtgagcagccgacgggtgcctcagtgtcccatgcagcacagccacgcagagcaggcgagggccagcccccaggaagccgcttgtgcctgcccgcagtgggacaaacctcggcactgagtgtgtccacagatgccaacgcccctcagacggagtgagttgatgactgttaaatgcaacaatataaatggccttgtattttgtatatctttccttttttgttttatttttctagctgatcttttttactctattttgcaaaagttagcagtctgcagggtgcttccccctggctggctggagaagccccatgtgccgagcctggtccgaggtcctctgagcccccacgtcgcctcgctaagttgctgtgccctgaccccagtgtgggaggggccatcagagcacatgtgccttctacttggtgagggcggcattatcttggggatgcaactgcaataatcaagaaacttagaaatatttcggatgaattaactgagaacgcagtgcactcactggcatggccacctgccctcacctggggcgtgcctccggccctggcactgctctgccccacccagttggtggaatcatggaagcagaagaggggtggtccctgactcgtgtttgtgctgtggagacgcccgcaaaggccaggacacttgcatagaatgctcccggcactctcccgtctccagggctgtgtgtaagagtcagtgacagaactgtacgcagcgtgcaagagacaactgccatcactgccaccttgaagggcagcctgggcacatactgtcgagggacaaggaacttgctgacagcagaaggcttcatgccacatgcttcggtctgtatacagtccaaatccggcaaagtggcacgcaacactgtccaggggttcactgcacatggcaaagctgtcctagagggtaaggatgacaaatgcctgtgcaggagggaggtcgcctctgggaaccctgggggaagcaggagggatgtgttccagctttcctgggtgcctgtctggcctctctctgcccagagcccgcccccacagcagcagacactggacggggtcccaggccaaggagcactccactcagtagggtgtgggggcttccctcctttcaggagctcatagagtgagggggcccagggatcagcatgcagctttcacccccagccccatctgggaccagcgtgcactttcatccccagccgccgtctctgcttctggccctgccgggacttggggctgcctgcgcattaaatggcccaggtctgtgtcctggttactcaagcctgagagagctgccacccttgtaggtcatggctgcaggaaatcaggctgtcccccaggtctaggtgggtctgccaaaatgccccgagacgtgagcagggccgtgaggtcagccctgggtggcgccgctcctcctgctcgtgtgcccagatcaatcggctgcccccgctggaaggggacgctgtccctgctggggtccggagcccacttcgggctccctctctaaccaacagtggctccctggagactctacatgccccacccttgccctctgctccactgctgggaccacctttgctctcaaggactgtggacaccggtgaagaggggcacccggtcgatgccagctggactccgtccacccctcgagagccagggcgttgggctcactgtcttccccagaggaagcctcgctggggccacgggaggctcgggcctctgttcctccggcacattctggcacggtggcaggggaggctccttaggaggatgaggggacggagaaggccccaggggtctcctgcaggcagcagtgtttgctctgcagggcctggaggttcaggcagggaggtggaggcgactacatgtggacgcaggttaaaggacaaggattctgaacatgccggggctgggtcccggcaccatcagagccaagtcaccggctccctcggggaggagagagctgtgagggctgagtcaccggtgggctggagtggaggggaggatagggcgacaggtgaggacacttcaggccgggcaggcttccagcgtgcggaaggggccggtgggtcagatggggggtagggtggaggcactggctgcgtggcttcagcaggcatcaccctggaatgtgctggaataacaagcagaggcggcgtggagcaggatggagggcagaagtgcagagataggagtgtgtgatcctgggtggaggcgctgacgcctggccggcggagacgacacttctggagcctcgctgaggctggatcccaggcgcaaggggcgggcccaccacgggggaccccaggtcacaacaaggggcagctcagagcagggtgggggcccccaggccacccaggagtggaagtggctcgtgatgctgtgggtgctgcgctgtgaggggctcctggtcctgccggcctcccagctacacgtggcccactcgcctccacagccgccaagcctcccttggggctcctgctctcggggctgggctggaggggcctgggagtcccagcgggcgaggaagccgggcccaggggagagcagcatgctgggtcaggagaccggtcgggggctcggccgggcctggagtccagcgggcaggggctggcagggagtgggcagggtgcccgccaccccgagggccaccagggaagaccatctggattgggtttgcggtggaggctcgccagcagtgttttgactccaggcaggtttcagagtgtgaacggcccccgtgtcatctgctgggtccctctgccagagggtttctgaaagacagatggccacacgcggaagctgtcggcggcgtgtgggcccagcgatgacgggggtgcgaatcctgctcttcctccctcggcagccagcggtctctcagtcctctcccgtgttctcactgtaccctagaaagcaaagcccgagctcctcagcatgctgtgggggcgagtgggcagagccaggcgtcctgcgggcacacatggctgtccctgtgcctccatgagcggggaggggcgctggcgggagcccccacacaggcagcctccccacctgggaccccacacaggcggcctccccacctgggaccccacccaggcctcctgacctcatggggctgggcttggctacaggagggcgctttgcgtggaacctgaacctggcctggctttgcctccgtggttttcggcacagggggaggggccggctgaattcctccgcaggatccaaggggctgtgcagacacgggccgtgactgctgggtcctccgtggagaaaatcaataccaagttggagtgagtccccagggttcatgtatcactctgcacccggaaggaactttctggaaatgcaatacatccctgcaaagtgggactcagggctctttcctgtcactgtgcagaaggcaaggtctcaaagggagaagatcggaaggctgggagcccgggagcccgcctgggagcctgcctgggcctgggtctcccctcagggctgaggagccccgggcccagcgcccacggtcgctgtagccaagctcacaggccccacctcctgcctggccatgcttttgcccacgtgggctgcagccagggcctggtcgccaccctccccaatgtggccctgaggccagtcctgtgctggcctgtattgacacgccggctcactcaaatcgattcttgtcaaagccgtcgtggaaagaacagctttcaaaatagagcccaagaagacgtgggcttccactgtgagagcctgggtgctggcgggctgcccagggtgcctcctctctctccagccgggcgtggagctccacgagcagctcctggctgttgcagggctgtgagatgttctcgtttgttcagccggaaggtctagagaaaggggctgagggggacgtctgagcacccagccttgaggaggaggccaggactgaggcctgggttcattcctaatgtgtcccgaggacaagcacatggaacgggctgtgttctggctgcagaccggcctgggagcgccctcgctggcctgggaacgggcaggctgcggggcagagggcaatggaccttctgcctaggtgcgaggggctggtgtgcagctccgcgccccggggaccccatcccagcccctcagccagcccctctgcagtggcagttttctcttcctgccaagaccttggacggagtctgcacccatccctgcacgtggcagagacaaaacccacaatcagatacacaggaagggccggggtcctgccacctgcacgttagaccctgagggtgacgtttgctctttgatcctctggtcctttgcgctccgggggcctctgcctggcatggaaatgttgattcttccctgtctgcctaagacagtgtgattttcagactagcagaggaggaaatgtccggcggctgtcctgtgggggtccacccaccctcgagactgtcatgggccgcgtgtctcccccggaggctgtcctatcctatcgggctctacccaccctcaatactgttatgagccacgtgtctcccccctgggcggctgtcctatcctatgggggtccacccaccctcgatactgttaggggccacgtgtctccccactgggcggctgtcctatcctatgagggcccacccacccttgatactgttaggggccgtgtgtctcccccagatctgtatgctgcagccctaagccccaatgcctccgcaagggaccttacttggagatggggtcctcacagaggtggttaaggtaacatgaggctggtggggtggccctggcccaatctgcctggtgtccttatacggagaggagatgaggacacagacccacacagagggatggccttgtgaggacagtagcaggagacagagccaaggagagaggcctcaggagccagcggagccgcaccctgaccctggattccacctcctgaatggtgagagagccattcaggctctctctgttgaagcccccaggctgtgggacttgttacagtgacccgggaactcacacgatagtcacagcacattacagctgacaaagtgagctccttccgtggagacgctcctcccagcattccggtgaggtgggggctggcacgtcacccccactctggatgaagaggccgcatcaggcgggatgggcttggctacgctgcagtcacaaacagccccacagctcaccatgggctacagcacaagttcattgcctgcacttcggggtgggcacccacttgcccctgttccagccgctgtgcttggcgtggctccctcctcaccaggacctgtgactgtgacgcatcagaggaggaggtgctaggtggagacaacgtggagactgagggtgagactggaggaggggaagcccccgtttcttattgagagccctacggggtcaggccaaggagcgcaggtggctgtgcgggaaggagctgcactctgctaggtgtgggggcttcccacctgcgctcccaggtgagccgtggccatgccaccaggcccctcaaccctgtgcctgccatgcggccctctcgaaggacctctggatatgtctggggagtcctgctcagcctggccccagtggagtctctgcagcaaataagcacacagcagcagcagtcactgcacctgtggccctgagaggctgtgagcacacaacatcctggctggaaagaggggaggcctggggtccgggcagcttgcggggccagctgtgcacccagtgacatcctcatcaccacccacgccgagcacagcagagaccccgagccgagggcagaaggagcacacggtcacaggaaacctttccttccagttctctgtgcctgcacccagcacttcgtgtctagggatgaatttaatctgcacggtgacctctgaggtgggcactgccactgtcccagctctatagacacggagtgtggcgggcaacataggaaacagcaagcctttgagcggaggggggtctggctgtggcttcccctctttgttgaatggtgtccccacagaaagatctgtctgtgtcccagaacctgtaaagatgaccttatttgaaaaaagggtctttgcagatataatcaggtcaagacctggcagcgtgatcgtcctgggctgtcaggctggaccacagcgcctggtgtgaaggacaagcgccttcatgaagagaagagaaaacccagggagagccacatggagaggggccgaggccgtgggagggccaggcagggactggagggaggcagccacaagccaaggaacgcctgggccaccagaagctgccagagacaaggaagatccccctctagcgcctctggagggagtgcagccctgcccacagcttaatttggggcttctggtccccagagctgtaagggaatcagtatctgttgttgaggccacctggcttgttgcaagagccccaggacacgcgcccacttggccacgttgcccaggcggttgtggtcgagtgcccagggttccggccccagcgcctgcactcctgaccacacaggaggttgacgcctgccgggaagtctgctcacggcaccctctctctttccggattccagtgcttcctgcggtgctctgtgcaaaggagtgctgccggctcccatccccagcctctcagggctgggaggtgacatccagcagcaagcaggggccccgctgtctgcgacagcgtggctgagagttggtgccggccaggtgtgttggctcatgcctgtaatcccagcgctttgggaggctaaggtgggaggatggcttgaacccaggagttcaaggctacaatgagctatgcttgcaccactgcactccagcctgggcgaatgtgagaccgtttctataaaatacaatagagagacggcgagtcggtgccacacgattggcccttggtgtgttttccctgcccatcagagctaccccaaggaactgagtgagcaaatgtgtgcctgtctgctcacctgcttaagatgcaaagtgtcgaaagcagggccccacccagcatcttcccctcccgcaggtgcctggcacgctgggctcctgccgccacaaaccgacgtgacttggtgaacgtaagtgagcactggctgaccggatcatgtttaaaggaatcctttaggggaaccactctgcaaagaaagtaaccctcagtaactcgcttttagttatatgtggacttcaccttatccggcttccataaggtggatttgcagaaagccggggcggtggcgcggcgggaggcgtgggagctggtgggattctccgcaggtgctgctgggccgggcagtggctccggtggggggcgctgtgtctccaggccctgacctggctcccgctgggccggctgtggcagggaagagccatttttcatggcaggggggtggcttcacaccggcccaagtgccagtatgttccacagttctttttgctgacggaatcagccatcagctcagcccaggtgacttccaacctaatctaaacaaggtggggtcggtggactcagctctcacaaagaaagacacggtgacgtcgggcgtggccacgtgaggcaggggtggggagaggctgacagcctctgcctctccctccaccggcaccgcccgccccaagctcacgtggcccttgcggacgtcattccttcactgggtcgtgccaagcagcaggggtgcggctgtcccagtcctcacgccctgccctcctcgggcagcctgggtgtccgctcctgcactcagagcactccccgccaggcaccccccgccaggcaccccccatccacacccaaaggcaggcccaggcacatggcttgggtgacagagtctgtttggggcgatgcctgcaagccctgtgggaaatcggggtggagggagcgggcggggccgagcggccgcgggaacgagcagtgccctgcctccaagggagccccgggtcctctccccactggctggccctgtcgtggacatgagctctcaggtttctgacgggctgagcgtagtggctgagggctccctcaggcaggggcaggtgggcttgggccaaagagaaacctcttccccgataggggacacagcagacagccaccaggagccggagtggaggggccaggctgtgctcagcctcacgacacactggcgttcgctcaagctcatggctggcgtttaggagggcaccgcgagcacctactgagctgggatgaggtcggaggctgcccctgcccagtgagatgaatgccccggggccatgtgggctcttggccgggtggtgccaggatgtgcctggatttcagagtaggtggtcaggggtggccacctgctgggagtctggaccgtggagccggggcgactgggcttcagcttcagtggctgcacaacatccaaaagcagggggcccttgaggacccagccctgctctccgggcattgggcacttggccccagcgccccccctttctcggtgcgaggccgagcatctcccaagtctggtgcccacccggctgccttggcctctgcccactccaagccagctcttactccgccacaggcccggcccctctcacttccagcctgggccccactgtcacttcccatcatctccctcctgggtgacagccttgggaagggtctctggcctagactctgatcccaggacacggcccttcctgctccttggtggccttcctgggcttccaagtccgcgaccatacccatgacctgctgcccgctgctggtgggcctcagatttcccggaaagagggaagaggctcagaccagcccatagcagctttccaggtgaggccgtgatcatgagcagtccagggtccgctgcctggtgggggcgggaccgcaggctgggcagggacagcaggcaggggtccctccccccacacagccccccctcctgtgcggggctctggggtcctgccttacaggggtcctgtgtcacctcagtggggagcaggagatgggcccggggctcggggctgccatctccactgcatggtctggggctgagctgtcgtggagcaactcgggccacatgtttgtaatttggggacaattctgtcttcctgtaattttattgtatttagtaaatgcggtttaattttcttcctgtatagacttctcaaataactacaaatcaaaaaagagcttgcagtcccttcaggggcaaccgtggcctccaaggacccaacagcaggcccgtggcacacactcatgcccgctcccactcccagacacttcacgcctgcactcacgcctcacagccacacacacgggcacacccacagtgggcacgctcacaccccagtcacgcacacacacacatccacacacctccctctgctgcttcctccctcaagtgcccgcacccccatgcgtccccgtacagtcccagtcagggccgctcccccgcaccccccgtcatttcccacttccgttcccagcaccggcattcggcatttgccgcgggccgagggctggtgcgacagaagccctgccagcgccacgagccgacgcccctgtaaaagcggctgttccgcgcacacaggagccgcctctggcctgccagacacgtcctgcccggaggaccacagacccgaggccggctaggaccagaggaccgcggctcactggccatcagcaggctcacagggtcccctcgcagcacccagggggctggggcccggccgaccactgagagaactcgccgtgcatcccctgccggcctccctgctcaggggcagctgggacgtgggcagccgcctttcagactctagccagggtcccggatgtggggaaggccacccatcaggcgagtgtatgtgagacgtggggacaacgggggcaccccacggagacaccagcttgtcctgccgcgttctccatgtgctggagtgggggtggctgcaggcgcagctgcttcccctggctcatctggctttcaggtggtcacggctgtgcgggtctgttccccagctcccgggggtgcaaggcagtggcaacgcagcggccctggtggctttatgctcccggcacggctccgggggggctgccgtggtgacagtgcctggtggggcggcactctgtgcctgagtctcccaggaggcccgtctggagtctgcagcccatcctgggtcctgtgataccccttccctgtgttcaatcccttcctgctcagagtccttgggtccacttttccctgcttggacccatctgtcatgaacccttgagtgggtggtgctgctgagggctggtgcctggaggcaccgggccagctggagctgggagggtgggcagaggaaacgccacatgaagaagctgcagggttctccattctggccacacaaagtgcccgcagtggataatgcttccaggggagtgggggtgactggagggttggaggggtatctggacagctccctgggggcagttcccttgtgagcgtttgtgggggtgaaaatccctgtcacgtctccttccagaatgtccattctacttcaatgccaagtttaagtacatggtgcctaacccacgccctctgtgtgcaactgggtgaggtcatctacccgctcctccaggtcacaacaaatccatccctccccagcctgtttccaacttgactgaaacacccctaaatgctccacaaagttcctgggcagccctgggctccaagaggcttggccaggggtgagcttaaaggagagcacacatgtgcacacacacggacccacccacagagacacgtgcatacgcatggatccacacacacaaacacatgtacacacaaactcgcatacacaaacacaagcactcacaaaatcacacacatgcacacagtaactcatacacacgagtacatgcctgcattcacctgacaacacaaacacacatgcatacggcaaacccacatgcacacacctacgcatgcccacgtgcacaaagcaaatatctgcacataaccaaatccataggcgtgcacaagaaaacatatacacagatacacacacttgcgtgtagtgcacacaagcatacacaaacacgcacacacgcaagcacagatgcaggcacacacggagagattttggttctttgctcgtgaatcatttgttcactaattaaatcacccatcagcttctttgacaagggcgtcatgtgagcctcctgcatgccagggtgagttctgagtgttgaagctcccacaggaaatggcaccgtcccgggagcaacagtcttgaagactgtggatggcttccttgtcttgccctggccagaggcggggccctgggttagcacaaggctttctcagatgaagttccaaagtttccccataaaaggagtcactccaagctagcgtcgcccacgacatccttccaggcctggctcccctgggccacgcggagtggagggggcaggcgggtctgtgcagaggaaggggcaccctccccgtgcagggaaggtgctctgctcttcccacccccgaatccagcccccaccccactccaaggcacccagctctgccccgccgccctcctgttcatcctttcgcacttttgggggcttggtggctttagcatggcctgtcccctccagggacccacccacctgtatgacagggtttacttcagcctcatctgggaagggagcagccctcgggaggcccctcaagtacacaggagatgaagaagagagaaactgaggctgagctgctccgattggcccaagggtcctgagttggaagatgacaaagaaacccctccttagagtctggactctgcttccccagtccatgaccatgtggctcaggagctggggtagggggcacccaggaggatggggaccctcaccttctggggactgagggccaagaagcccactgagcactcagggtgtcctgccctgccctggagagagggcggctggaacctgcaccctgggttagggggtgaggccggggagccaggcaagtaccaggccagcttctgccagaccgccctgtgggccatacctgtctctgacgtcactcaggcctgtgagcctctccctgtgcttcctctgctagcacatgtgtgagcgtgtacatcacacacagatgcacacgtgtgcacagagatgtatgcacatagagggatgtgcacacacacactcacacaccattgtgtgttacaacgccctcttaaaccttgaaacatttgggaagatgcttgacttgtttggttgcccctttctaattcacccatctcccaactgttcacgcccttgtcaaccccccaaccccagaccctccaagtcacctcccaggtgctgctgtcagccccgacacctccttcctgggcaggggttgtgaggggacgcctccttccaggacagggggcaccgtctgggcagtaacgtgggccacagttgccccgtgaccctccctacactttgttgctctcccagccacaggcctggccctgacgcacagcagcttctccggccagctgtgcaaaaaggaacgcgtcctccctgggcccacggctgggtggccacgtagcaagggctcttccactgctcagtgctgttaccctgggatctaaacagggcttggggcctgacgtgaaaagggagaagcagtgttaccagggacatcctcctgggggttttagaatctcccccgtggagggggaggagaagaggaaggagggagaactgccggcccggccccatgagtggagggtgcaccaagtcactgacctctggtccctgcccacctgggagctcctacctcgcaggcagtgccagtctctggcaggggtcaggccacctgttctatttgcctttagttcatagcctgatcaaaaggctaatgagttcaaagtcacattccttatctcatttttgagtgaggactcaaaacctgcacctggaccagtgaccctgggcattttgtcccatcattgcacaaccacggtagcttttatctccctgccggccttttattaggtgcagccacgggttctttgctttctcattcaccgctgacgtctgtactaatgacgacacgctttcgaatgccaattcactgactgaagtactagccacaggtttgtttttttgttcacgcccagagaatgtgtcttggcaatatgctcctgttggacgttattatgcagtgatgctatatggcaaatgtgccccaggaatgccacactcacaaggcagcgtttggcctcctgtaaaaaaaacccacagagacaaataactaagaaaaaaccatggaagaaagaggtaaaggattcatgcctttaatataaaaagagttctcagaataaataagcatttccttactaggggcccatcttttgattttgcccgtgcaaaggaatctgtggctccttcctttgtaatagcccccagtaaaccaccccctcctgcccttagtccagatgatttgggtgtgctgacctaaattcttcacctccagagattaaacatgacataaacctggccaatgaagggcttgcctgggaccgtggctgggactatcagggaaaagatatgctttctctgtagacggtgaactagtaggatgttagctacctgtcttagtctgctttgtgcagctataacaaaatatcacagtctgggtaatctataatgaacagagatgtcctggggaggctgggaagtccaagagcatggcactggcatctagttagggccttcttgctgcggcatcccaaggtggaaggcagaagggcaagagtgagaaagtgagagcacacacacacacacacacacacacaaagagagggggagagagagaaagagagagcgcaagatggggccaaacttgtccttttataaggaacgcactcttgagataatggtattaatccacttgtgagggtcgtacccctatgacccaagcacctcccattaggccccacctcccaccattgccatgatggggatcaagcttctgacacatgaactttggggggcactttcaaagcatagcaccatctttgctacaaactggaatgagcctgcctgagaacaaagccaaggcagggaagtagaactgagggatgctgctgaaaaaagggaatagaacagataaacattgtgtgagcctgggtcgagctcagcctgaagcctgtagtatcctgggccctttagttatgttaaccaccaactctccttttagcttgaaccagtttcagttgcatttctgcctctcacaataaagggagccttgactgagacccactaatagaaaacggagcagaaaataagaactgacactcaaaagaaacacaaatggccaatgaacatgaagagaagaatcactttccataaggaaatccaagaagtgcccattacaataaatgcatgctattacggattgaactgtgtccccctactgaaaggtatgttaagtcctcacctcctgtacctaagaacatggccttatttggaaatagggtggttgcagattaactagttagagtgagaccatactggagtaggctgggtcctaaatacagaatgcctggtgtccttataagaagagagggaggccccgggaaaagccggcccatctgaagatggtggcggagactggatgagggatctgtaagccaacgactgacaggtgtccctgagaacctccagaagctggaagaggcatgaaaggaatctcgccaggaggctgaagagggaacatggccttgcccacacagatttcagacatctggctccagaactgtgggaggacacatttctgttgtttagaactgcctgttttttatactttgttatggctgccctagggaactaatacagatattattttccacttctgaacttagcaaaatatttttaaaatgaaaattcttaaatgttggcacagtttaaggtcaggggtgccccagcagtttggcaacatatatcaaaggctttaagacactttatcctctttcacttggtaattccatttttaaggctttatcctagggaaaaatttcacataggaattaagagttttgggaaagatgctcacaataacactgtttatagtaacgtgtagaaacaataatgtctacaaatagaaatgttaaataaatgggaatgttacatgttaaacatgagatattagatattaagaataatgtatttaaattatatatgatacatggaattctctttctacaaatagaaagagaggctataagagtgttcatatggggtacaatccaaatttattttttaaaaatttacatctattcaactagaaaaaaatgcaccaaaatactgagtgatgatatctgagtggtagaattatgaattatttcttatatgttagtattattattttcatatatattttttataataatcatatattccattttatcatcaagaaaaaagttttaaaattctaaatcctttcatgtgcactgttttaaactaaggtagaagaaaaaaagtcactgaaaatccaagatgtaataaacaggcccaacaaaggccaacaaacttagtatatatttgctgtaataaaatattaacccacttgtgagggtcgtgcccctgcggtccaaacacctcccatgagaccgcatctcccaacacggccatgttggggatcaagcttccgacacatgaactttggggaacactttcaaaccacagtaccatctttgctacaaactggaatttttaaaaatatatatttataaaatataaatttggtagcacagattcaattatgggacatggccgggagcagttgctcatgcctgtttcccagcactttaggaggccgagacgagtggatcacctgaggtcaggagtttgagaccagcctggccacaatggggaaaccccgtctctactaaaaatacaaaaatttgccaggcatggtggcgcgcctgtaatcccagcactttgggaggccgaggcaggagaatcgcttgaactcgggaggtagaggttgcagtgagccaagatcatgccactgcattccagcctgggcaacaagggcgaaactccatctcaaaaaaaaaaaaaaaagccaaaaatatccccagaaaacaattatgggacacactgtttctaagtgacatctaggggcaaagcaaacacagctgctttctaaagccctccagggcgtggcgcagccacggagcttgcccccaccgggggtggctgggcatggctcaggagcacctgtgctcctggttctgggcccttccagtggctgcctgaagtgccagggtgtcagggcagcagcaggacccgtccaccggggtggggcaggggagagcatagttcccactggggaagcatgtcgggttcaggggagacgctccgaatggagagaaggaggttttggggatgagaaagctgaggtgtctcttgagaactcggagctcctgggagcacccggtgtagtcctcgcagatgtggagcccaggccaggctgcaggtgggctgccaaggcccaccccactgccagcctcttgtgccaggcctccctccgtgccagagggggctcaggtttctaaggacggggcagggagctactgggaggtcctgtggcccttttggttcttgctgaactatgggacctggcttaacatttttttattgcagtaaaatacacataacataaaatttactattttaaccatctgaaagcacacagtttggtgacgttaagttcattgacactgctgtgtaaccatcaccaccatccacctccaaacttttccctcttcccaaactgaaactctgaacccattaaacactcactcccccagccccagcacctcccactctactttctgcctctgtggatttgagtactccagggaccttgtgcacgtggaaccatacggcatttgtcctcttgggaccagcttcgttcacgcagcatgatgtcctcctggttcctttgtgttgtagcatgtctcagaacttccttcctttttaaggctgagtaatattccattttgtggaacattctgtgtctccattcatctgtggatggatgtttgagtgtcccacctcctgctcgtgtgaactgcctgtgggatcaccatgccatctgaggactcaccgaccatttcctacagcgactgcaccattcacattcccgtcagcagtgcacaagggctccggcttctccacttccttgcagacacttgtaattttctgttgtgttttgatggtagccattccaatgggtgtgcggtggcatctcaccgtggttttgtggacctggcattttagaggggatggagacgaggcagtcatgggggttcccagggacagggtggtgccccactatccggtctggctcacctgtccctacttccccgtctgtttggtgggcttctgacccccacctccccagcatggggagaatgtggccagaggggaagaatctcctgcaatgcccagccatcctgccctgtccctggccccttccgggagagggactgactcagtgaagggtggacgctttcactgttccagtggctcaccctccgtatgcacacccaggtaaaccggtcagtgaagaaacactccgaacaagtcaaggaggaggctcagccctctggttactccaggaagctgccggtcttcacccacacagagccccggcccttcaggtaggagcggccagaggctctgaggttgttgcctttgacccactttctcagccttacctaagaagaggactagaggagccagtaggacagctggccggggctggggcaggacagagctccacagggaccctcagacctgctggcctcggcctggtattgggtggggagtggggcacagcccattccctccacagtgaccaggttgggtctgaatgacccagtttggctgtccacactccaaaaatgtgggacaaggggcctctggtggcctccttttgggagggcatggcccctgggtgaggacagctgtggccccccctgtgcagcctgcaggaggcccacagaccgaggcctccaggggagcttctgctcctgggccagggcatctcctgaccctctctctccccttctcttacctggttttagaggcagcgggtggatgagcagccggtctagagaagggctcagacaagtcctgggcatcccaacagtagccttgagggacacgtgcttgtcctattcctaactcctcggcattctttatgagtgggggaacccatagggggtccctggaggcagtagatggggagcaggcatcgtcagggtgagtctggtctggggctcgaggcgaaggcagggcgaggatcctgggctggccgtgttctctcccttgtcgtcccctgccctgctcccccgctgtgtgctctcctgtgtcgtcccccgcccaactgctcgttatcctggagccctctcccagccccactgcttagctggtgtctcccattctgggagtctcctccccaccctccctcacccctcggcccctccgatcgagatgtgcccgtaccaaccttgccgttatttcaagggtgcccatcagtgtgtgcgccctggaccttagcttcatctctgtgccctgccctcttcgatgctggtgttcgtggaatcgagtctccccaaaactcgcatcccctggatgctcagaatgtgaccttatttggaaacaggatctttaaagatatcatcagttaaatgaagacaaagtcagactggattttggtgggcccccattccaatggctgccgtcgttataaggaggcggcaggaagacgcggagatggaggcagaggcagcacttggagagatgtgtctacaagccacaggacaccaaggcttaccagcggccaccaggagccaggagaggcatgggacaggtccttccccacagcctgcagaggagctcagccctgccaacaggcattcgagcttctacttcccagaactgtgggggaatacgtctccatggttttaagcccccagtttgcatttcagcagctctaggaagccagtacagtactgaattcaatattcatttaatccgagtttcatttttaactgcatggtatgcggtgtctcctgtttctccctaagccaatcaagcctcatttaaaaagaagaaaaaggactcccaaagagtagcatggtggcctgctcaggaacgcaggggcagaggcagcagcaggggcaggggcagcagcaggggcaggggcagaggcagcggcaggggcaggggcaggggcaggggcagcagcaggggcaggggcagcggcacgggcaggggcagcagcagggccgtctgcactggggcctgccccaaagccgtcccacctgcacctcacaccaacttcaggatgctgggaccacacactgttcataaagaaatggagggcaggcgcagtggctcacgcctgtcatcccagcactttgggaggccaaggtgggcggatcacctgaagttaggagttcaagaccagcctggccaacatggtgaaactccgtctctactaaaaatacaaaaattagctgggcgtggtggtgcatgcctgtagtcccagctactcgggaagctgagacaggagaatcacttgaacctgggaggtggaggttgcagcgagccaagattgtgccactgcactccagcctgggagacagagcaagactccgtctcaggaaaaagaaaaaaaagaaaaaagaaacggaggcccaggctgatgatatcaccgccaggggtgcccagcagggacagtcggagcagggctgtgagccgggttgaggaacccagagcccacctcctcccactgtcctgcagctgagcagccccaggcctgtgagccagctccggccaccagcagggatcaaagaaggaatcttccagcccttgtgccagaatcacccgggcacctccatgggatctgccaggcatggactgaatgagaaccttccctgaggacaccaactgctccaggtgagggaatgatgaaggctgggacacccaggccctccactgcttcctgtcttttaagtgctggagcttctgctggattccatgttacagatcatatcacatcctccattctgtgacatctcacctccactgtcgggacatcaccctgggaaacccagggtggcccgtcccacctgagaaaactgaagcaaacccagctagtttgaggatctgagactcccgtggttccaatcctgggggcccaggtcctgaaccttcttgctgatttcagatctgcagtttatttgtgcaaaaaaaggttctggaaactttcttccaggcctcggagtgaccgagagattcctggccctgaggaagagctgattggaccttcttcctggtccagctggtcccaaggggctctgcccaatttcaaactgtccccttgttctcagtagttttgaaatgagctgtgttttacaagaaacacatacttatttttccccatcacactttcgttctttctggtttaacagggaccacggtggaaatgccagcgagacggtggtgtgctggtgccactgggcctggtgccacatcaccacgtccctgtaaggtgtcactttagagtactctgtcattttcattagccgatcccaatgacgtctgtacttgctcatgccatacgcagcccatgtgttttcttttcaaacaaataacaataccacccaaaaccacaacagccaggtcaaaatgaatgacacccattgcaggccacactgcaggggctggggctgtccttagggccctgtgtcctgctcgaagtcaggggcttccacggattgacttggcaacccagggacttggctccctactctcttgtttttactttttttctttctttttttttttttttgagacggagtctcgctctgttgcccaggctggagtgcagtgggcaatctgggttcactgcaacctccgcctcccgggttcactccattctcctgcctcagcctcccgagtagctaggaccacaggcgcccgccaccacgcccggctaattttttgtatttttagtggagatggggtttcaccgtatgagccaggatggtctcgatctcctgacctcgtgatccttggcctcccaaagtgctgggattacaggtgtgagccaccgcgcccttggttcccgactctctgtagctcccagaccctgcatggcagccacacccgtgggtcccaggaggtgtgtggggccctctgcttaaagatccctctcagtggctctgcctgtggcctccagagacccctcctcctcaggcggtgctggcccacgggcaccaggccgggcatccagtctcgactccggtggctctcagacagccaggctgtcttaaaacaaggctcctgaaatgtggagaaatggctcatcgagtgccaaatgtcggcatagggccggggaccacgagaggctggggatggatgagccaggtcaggtggggccacagtctcatgctgagctgtggtgtctgtttccacggggccttgaatggcatgaaaagggcccccgatgctgccgcgcccccgatgccgccgcgcccccgatgccgccgcacggagctgtccagtcgggatgctgaacattgccacagtggaattctaggcagacaacttcagcttacggttctgcttgccatttggtgacctggcaagacacttcctagataaggctggaaaaggcaggacgcctcatcctgttttaataaaaagtgaataagaaaacgtcagctatgaagagcatttccggtgctttttgttttcatctttacatacttactttcttgattttctatggaaccttttctattaatttttatacttcgaagaaacctgctttataagagaaggcccggcagtggagggagcatttcatcgttttcccatagatgcagctgagatggagggagacccatccggaagccgtggagagagcgtctcctcagcccgccctgagacgggggtcctcctctctcccccatggtccgggcttggcttctctgggctgtgagatgcacaagtgaaacgcttcaatctccaaggccagagaccttccacccacaggcctcacgctccttcctgccacccgcttcccatcgcagctccttgctcctcagcttggctccaacagccccaagtccctgcctccctttccctgtcatcctcgcctggccgtgtcaggccgtgaagccgggacagaccacactgctctgtgcacaccccgggcaggcaggcgctgggcagcaggttgcagatggatgtggacggcgccaaggacccccactgggtctgtcttcccaatcgtggcctctgctcttcttcccctctgctgagagcctctgctcagcattcagagagggaaggtgtgggtggctgcctcctgccccatgccccccgccggggctccacctcttctctctcctggagcagttggtgttctcagggaaggtcctcgctcagtccacgcctggcaaatcccacggagaggcccggaagcagttccctccatggccactttcctgccagcattcttttcttactcatcatcttatgctgttactgtctccgcaactggaaccaacggtcctcgagagaaggtgtcttgtgtccctcctactgtgcccacaaccttcacgcagtgcctgacacacagcagggcctctcgagcctttgtggacatctggaggacgactccgaactcaccctcgcgttgcaccgtctcacctctctctggggacctgtcccttcccacagtgaacttcgaagcatgtctgtctgtcaccatgttctggcacagtctggccatgctcacctgtgtccacccgctgactcattgcagctggcacacttgttgcaaatggcagaaactcacattattttgcataagtaaatagtaaccaaaaaaaaaaaaagatggtttaccatgctctacactagcagccagcatgtcacctggaaacaccgagacctgagctgacactcagacgtctccatctcccgggagccacgctccgtgtggccctggcagagtgcccaggataaagagcacggccagcacctgctccagtcctggtccccagtgtctgcacaaagctgcagcatcccagaggcttctgctctgcctctggggacctttgctccgtttgcggatgcggtttccttcttcctacagagaggcaggtggtttactccagagctgcctgctcagcacagggtgacctcctgccaggctgtccatggtgctcttcctaagtgagcactcccccccgggggaacccctggctctgtttggggcctggctgactctcgctggggctggccccttcctgcacccccctcccccgccgtccgacctcagcatatggctcagggacacagacacccaaaggcctcttgggtcctcagccttgatatcggccacagccctgcttaaatgtcaagaaaacgcattggccacatgaataattcctcactaacggcagcgacagaaaccggaaccagaaaccctagagggctggagcggggagggccgactggcccgtgaacaggcacgtttctgctgctttgccggccttcgtggtccatttaagcagcccgtggaaggcctagcctgaaagtgggtgctgtctgagatggggaggggccctgggcccggtaggatccacacaactgtggcagccacggaaccacagggagccaagtgtaggaggtgaaggaagcaatgccctgggggcggacgctgggactgggcagtctctggtttgacctgttcgcgggggattcttgacttaacctgtggacaactgggccattccctgagggtggagggggctgggggcttttctcctacctgccctcttcccaggccagggccgtggcttcctgacctagtgcacacatgtctgtctgtcaagctctccagatacaatggggcaaaatgaccaacgtggcccccgggtccctgagaaggatgccgctgcagtggttaatctgattttctggcacctaaagccgctaggctgaagcctaaacaaaccaaaacaaaatttaaaaagtacaaaaccacctgaagcaaagccaggaagacagggaagggccttaggcgtcgaagatgggagggtagggtcgggaagaggaactcgtctgactcctggctgcactgggagattccttcctcacagagggcggcactggggccagctgggcacccatccctttgcaaaaatgctgccccacgctccattctctgtgtttatcaattgattttgagagttttgtgacatgccagtggccagcgttacaactatgaataataaatggacccatttcctgttggggtttccagtcttaaggcctaaaaaacaagatgaactccagaaacacggcaatcataagacaagctgaagaaagtccatgtggaaaggaaaactgacttgccgttttccacaaatctgtaataatatgcaaaccataataataaagtaccgttcctgcagactttgggagcattccttccattatgttcagtgaggagcttctccaatcatttgcttgtaccatccttacactcacaccatgtgttttatttttcctcgtgttaaaggcacggaagaccagaaaacagaaaagaaatcaaagcttctgagaggaaatacagcctcggggggtcaaggacacaaacaacaacaaaagacattgggtaacagagaccaggttgaagcacagacttagttatgagggtgccaggggttcccccagtggggagacgggacagccgttccaagcttggccttttcctctgtgcttcctgcctttctctgcagagcgagctccttgcccacgggcccagggaagggaaaacaggatggccatggttggcacagggctgttctgggttttggaagctcagggctgggtcagggtgaaaggtcaagtgcacctgagtttggggacctgttctgcggaggcagttttggctgcagtttttatttggtgctgatgcaatgtttccaaacagccagccaggtgtttgcaaatacctaagaccttttggaagactctggctagggtgggaggggtggggaagcctgcttcctggatgcggggggcagtatttcaagtcacaggctgagggactgaatggtgagtgtgatcaggggcctggtttctcccccaccccgccttttatctttgttcttttttgagacagggccttgttctcttgctcaggctggagtgcagtggtgcaatgacagctcactgcagcctcaacctcccaggctcacgccatcctcccacctcaggctcccaagtagccggccccacaggcgtgtgccaccacacctggctattttaaaagtattttatagaggtgaggtcttgctatgttaaccaagccggtctcaaactcctgagctcaactgatcctcctgcctcagcctcccaaagcactgggattacaggcgggagacacgacgtccagccttgtttttgtttagttctcctaggagcggattaacagggtgttgggacctccaaaaggaaaaaaggcagttgtacactgttcagctgaaaggaactaaaaatattcccccgtattcttggtatataaacctgggacaaagaaaaacactctgaacgattaaggaaaactttgggactcttcatttccttgaaagcctttgaaaaccaactgactcccaaacaacccgtgtgtgtgtatgtgtgtgtgtgtgtgtgtgtgtgtgtgtgtgtcgattgggaaatctgtggtcagaccctcgggcgaatgaggagaagctcatcctcgtttctccgggccctcctcccaggcgtccgtccaggcaggaaagcctcccgagaagggttccaagttttgtgccaacttccctgaattctcgttcccccttctgtgaagtagtgttatttaacacaaggaaaactgaccctaggctcgatccagaatctaactcccaaatgggtcctcaggcttaaaaaataccttcgcccacagcctctgtctcccctgaagaaaacgttttccgttcggatgaggcatcggccacgggcaagcaagtggtcccgcgcccccgtcccctacccaggcggccggcctggctccgtcaccgcccgcagcgtccgcccggggcccgcgcgggaagagggtcccagccccacatgctgcgggggcagccccgggacgcgcagacgccagcgccgctgagggccggggccgggaccggccgcgcggcgggggcttccagagcggccggtcacgcttccttaggtttcaagtttctaacttgctgaacatttcagattttaacagcaaaagcggctgacgtccccgcgggcaagcggcctctcggggtctgcagcgccccagggcatccgcgccgccagccccacgcgcgagcccgcgaggcccccgggcccccgcacgtcccgaggctctgagtctggacgaacgcaggccgcgtggaggggccggcgacccctgcccgagagccgtcccctcctggagggagcgagcacaaggcgcccgcgggacccggcccgagtgcccgagcgtggaggggcgggcgcgccctcggcggtggggccgcccgcagtgcccccagcgcccgggagggggcgcccggcggagcgcaggcgggcgggcctcgggcggcgggcgcccctgacgtcaccggcccgcggtcgccagggcaacggcctcatcccgcgcgcgtcagagccgccagtctcttggcaaccgcccgatctcccgctctccctccgcccggcgctcggccgcgcgtcgctctggcgtcaaagcgacgtcaatgggcggcccccgcccgggcggcgggggcggggcagggggcggggactacggggggcgggccggggcgggccggggcggggccgggcgccgcgtgcggcggagcgcggcggctccgggctgacatgcggcgcggccccggaggcagcagcagcggcggcggcagccggagcagtaggcacccgagcagcgccagcggccgagcgggcggcttcctggcctgggcgctccggtggcggcggaggtgaggcggcggcagcggcggcagcggcggcagcggcgggctccgggcgggcggaggtggccgccgtgggggctccgcgcgggcgccgggccggggctcggggttgcagccaccgcgcagggtccctggccttgcgcgcgcggggttcgcgggcggggttggcggcctggccgccctcgggctcccctttgttggggggccggggtaggagtgagtccgcggggctcaggggctggggagccgggggtcaggttggagccgaccgcgggcggagagaccgggtgtggggggcgggtccgcgatccccgaggtgcctgggatgtcgggggtggggaccggacggatcgcgggcggcgggggcagggtgtgggagcggggcaggggacggtcctgggatccggatcgagccgacctcgggtggcagggccaggtgtgggagcgggtccgcgcccagaggtgctaaaggggtcgagggtggggacggaaccgacagcgggcggcgggaggcgagtgtggaatcccggctcagggggtcccgggatcgggacggaaccggactcgggcggcaggggcctctatgagagcgggtccgtgcgccccgcggggctcaagagggtcgggggtccgggtggagcgggcggcgggggcgggtccacacctcccacggggctggaggggcccgtggatagagtgggggcgacaggcgtgggagcaggtccctgcgtcccgtggggactgggggctccgcgggcacggatggagccgaccgcgggcggcgggggcgctggtgggctctgagctctgtgcggccccgcaggtgcgcgcggagccatggttatcatgtcggagttcagcgcggaccccgcgggccagggtcagggccagcagaagcccctccgggtgggtttttacgacatcgagcggaccctgggcaaaggcaacttcgcggtggtgaagctggcgcggcatcgagtcaccaaaacgcaggtgcgtgggggcggtgggacccagccggcggggcctccccactggacccggggcgacccgacctttggcgggtggaccccatgcagattcactgctccaggcttgattgtcgtggtgggtaaatagtaaccgtttttagttcggtaaagaaaaataatgctttatattatgttgctgcataatttggacatatattgggagaaagcagagaggataatagcaaaaaaaaggaccaacctaagattgcagtggttcatggactcagagctaaaccctgtaaagtgagcctgcaaatacttaagtcacttacttaactctgattattttaaataacattagtggttactttggttatgttttcccaacttcttgtgaccttctggagacagagtgttgagaaattaacttgcaaaaaatgaaatgtgtaaattaggttgagggtttcttttctttttttaaaaaaacccacagaatatcctttttctttttaaatttgtaggttgcaataaaaataattgataaaacacgattagattcaagcaatttggagaaaatctatcgtgaggttcagctgatgaagcttctgaaccatccacacatcataaagctttaccaggtaaggggtcagcttgcctttctctgctaatcctggcaaatgtgttatattttatttccaacagcataagtctgcaatttctgaaggtggcttcccttttggggagtgtgtggaagttgggcatttggttgtataaggtaaatagattgatttttataggctgtgcagatatatttacaattattttattgcttttggatcataattgagatttgcttcattagaattttatttagtatcctaacctgatccagttttaaatgtgtagaagtctgttgtaaatttgctttactatgaaaacagacaaacttatctgtaggtattgccacaggtcacgcatttagtataaaaggacaaatttgagtgaaactggaaacttctgcctttgcagataattattaaactttaaagccagctgctcttactggttttcattagtttatttttgcaaggacagtagtgagcatttgttttccctatttaaactcttccatgaaaaacggagagatgaaaatacttttccatagtaagagcaaggagcttgtcatttaatccatgctaggaacatggcttgccctgtctctctgttggtttattttgtgacttaatttttgttctcatgttgaaattaataaattatatcatcaggaaataagtactaatttaattagaacagcaaagcaatcatttacacctccctaatgacaaatgaccacttttgcaaggtgaaatcaagtcttcttgcagaagaagttctttgcaggtgctatttcatccatttgtgttgggttgaagttcctcgtaatgattcttatgaaatggaatgtgagatgactctgggatgttgttgtgtgtgtttgtgcaattaggacagctcggtgtacagtgtggtaggagagagaattatgattcgaaattatcccccaaaagcctctgcactagattgaaaataaaagtagcagtattggtggagcttacgacagtttgctcagtgtctttaagcacagaattcatgccgtgtgcgcctggtttgtgttttgtttctgttgtcatttttaagttgtgtgctccatggccactggtgtactgcctgtgcagcgtgcccagcccatttcctcaggagtgggctgagctggttttgtttttgactttgctcaagggctgaaccctaatggtagtaccttccttttcttcctgttcttctcctttgcccattgtgtggaattagctccgttaaagaaacaaattgcccatgtgtttgctgctgaggtcttttctggaggtgcattttcttactgctgctgtatgtgattcttaactgttgggagatgatagaattcagtggtgtagcaatgacttttactcctctggttttgatgctaatgtctaattttctttcttttctttctttcttcctgtcttttttttttttttcttttttgagacggagtctctgtccgtcacccaggctggagtgcagtggcgcgatttcggctcactgcaactgccgcctcctgggttcaagcaattcttctgcctcagcctcccaagtagctgggactacaggcgcccgccacaacacccagctaattttttgtatttttagtagagacagggtttcaccgtgttagccaggatagtctggatctcctgaccttgtgatccgcccgcctcggcctcccaaagtgctgggattacaggcatgaaccaccgcgcccggccactagtgtctaattttcattccgctggccggggccccagaaccctgctgagacacttccctctttttttcaagttttcaaaaagttcaaacactttgacttttaattcttttcctcctcctccctttcttcagttggggacgggtcagcagtggtcttagagttattgtaccacccacaggggcggggcagttaaaattcttgccaaactgctagaatttatagaacacttttctttttagatttataactcaaagcagcaatctttgaagcatctttttttttttttttttttttgagatggagtctcactgtcgcccaggctggagtgcagtggcgctatggatcgtgactcactgcaacctccacctcctgggttcaagcgattctcctacctcagcctcccaagtagctgggactacaggcacgcgccaccacacctggctaatttttgtatttttagtagagatggggtttcaccatgttgaccaggctggtctcgaactcctaacctcaagtgatcagcctgggtgatcccaaagtactgggattacaagcatgagccaccacctccagcacaaagcatctttttaaaggaataactatattttgaacccaaaaaaatcttttttcataagaatatattgcctcatcctctccaaaatttttcaatactcacagacataagttatatttttaaatctctttttaagtaaaataaagttattgattagtgaatgaacttcaaagggctatgttggcatggctgttgtgtggctacatgctgagtgaatggctacatgctgagtgaatgaggctggattctcacagcctcattcatcctgtcaataaagctgggttcccacagcgtcattcatcctgtcaatcaagcgagtgggaatggggtgtgcattctctattacccaggtggctctgaccgttggctggaatcatctgttgcctactaggcttctataaagcccagcagacttccagcaatctcctcctctgtagccttcagaatactgtctctccttttttgagatggagtctcgctctgtcgcccaagttggagtgcagtggtacgatctcggctcactgcaacctccgccttgcgggttcgaatgatcctcttgcctcagcctcctgagtagctgggattacaggtgcccaccacctcacctagctagtttttgtattttttgtagagatggggtcttgccgtgttgaccaggctggtctcgaactcaagcgattctcctgccttggcctcccgaagtgctgggattacagggcgtgagccaccatgccccggcctaagcattctcaaattgtatgtgaggtgtcttgaattaaatatgaccacagaggggaattctaatatatttagaccttttgtgagagcaaaggtgtatcaggataggcaagtcagtgaggaattcacctctgatttttcaaagctgtctttgtgagtaggaatctcctattttttttttatttgagaaatttttctttttctttgcatttttaaatgatgaatgcctttgtcctagagaagttagaaatttcctggggttctggtggatggtttgtagcgctgccttgtgccttttttgtgcggttaaatgtcaggtctttcttctttaggttatggaaacaaaggacatgctttacatcgtcactgaatttgctaaaaatggagaaatgtttggtaagccacactcgttttcagtatctgttgaaaaccaatggcacgaacgcgtctggatttgcgcggccagtgtctgggccacacatcccaggaccccgcggtgttccccagggctccatgggtggtgggcaggctttgccctgggggctgtagctttgttttgtggctcctcagattatttgacttccaacgggcacctgagtgagaacgaggcgcggaagaagttctggcaaatcctgtcggccgtggagtactgtcacgaccatcacatcgtccaccgggacctcaagaccgagaacctcctgctggatggcaacatggacatcaagctggcaggcacggagggtccggggtgggagcagggacatcaagctggcaggcacggagggtctggggtgggagcagggacatcaagctggcaggcacggagggtccggggtgggagcagggacatcaagctggcaggcacggaggccccggggtgggagtgtgcccgcaagcagccccagcttcccggcatgtgccgaaaccacagcccctgtgccgaaaccgcagccccttgccatttgccgtttaacctcatccatctgtttctttgccgctcagattttggatttgggaatttctacaagtcaggagagcctctgtccacgtggtgtgggagccccccgtatgccgccccggaagtctttgaggggaaggagtatgaaggcccccagctggacatctgggtaggagccctgtgcgcgcagacccccttcccgaggccgcgttccccgagggcgccgtgttcccgggggcaccgccctggcgctgatgtggctctgtggtcctcaacagagcctgggcgtggtgctgtacgtcctggtctgcggttctctccccttcgatgggcctaacctgccgacgctgagacagcgggtgctggagggccgcttccgcatccccttcttcatgtctcaaggtgagtcgtgtggtctcgcctgggcaggggcctgtgtctcctgcagccccttcgtggctggcttctgagtccttgttgagtctgggaatcaggcccaggttactgtgggctgcgggagaaacccagcccatggatgccttctcagtgccctatttcgagggtggacgggtgcccttgctgcacaggcttgtgccttgcgcctgccgtccccgcccagtacccgcacccagggtgctggcatcatccctgagtccaacccactggctgtggctcacccggcttttctgtgtcataaagatgcctgtccacctggtgctcaggtgtggggcacggcagaagggtgaacctaagtggttctctgtgtggtggacacaaagtgtggcagcccccagggtctggatccctggctgatggctccccttgggtggcaggactgagccgatggcccggcccctgctcctgggccctggcgtgtcaaaccacgtggggcggtgggtgggagcgcagccgaggtcccggccgccctggctcagcctcctggcccctccacagactgtgagagcctgatccgccgcatgctggtggtggaccccgccaggcgcatcaccatcgcccagatccggcagcaccggtggatgcgggctgagccctgcttgccgggacccgcctgccccgccttctccgcacacagctacacctccaacctgggcgactacgatgagcaggcgctgggtatcatgcagaccctgggcgtggaccggcagaggacggtggaggtgagcctggccacacttgccctggcctcacccgcaggggctaggcagctgtctcaggggaagcaggcactcaccagctgagttaaaacgggagcacaggctaatttaggggccggcttgtccaccccactaaaggatattctcagtcacccaagaataacctgggatcgggtgggccctggggctccccgccatccccatgctgatctctgctcctcttgttcccagtcactgcaaaacagcagctataaccactttgctgccatttattacctcctccttgagcggctcaaggagtatcggaatgcccagtgcgcccgccccgggcctgccaggcagccgcggcctcggagctcggacctcagtggtttggaggtgagggggaggagtctcctcccaggccccaggctccctcccctgtcaggcaccggcttggagggcggttccttgcgtgggcagcgggtcccaggcctcgtggggaagggggtgccagctgctgggggctggactctgcccagaggccacttgtccctgactcatccctggggccggcctgtcacgccaccttctggcagcgcagcaccagcacctggtcctgagcccagcctggccagccagtgtccctccgtcagctgtcatgcccaccagcgaggcagcttgcactccagacagaagccagcttgtttcttctcttgatggcgctggtggtccggagtcgctcccctgacagcgtctttcccgtctgccggccccaggtgcctcaggaaggtctttccaccgaccctttccgacctgccttgctgtgcccgcagccgcagaccttggtgcagtccgtcctccaggccgagatggactgtgagctccagagctcgctgcagtgggtgagtgcccacagcgggtgtgcagagggctcgcctcagcccagccctggtgcccccggtgtgcccgggtcacctggagtccgagaagtcactggcttgtgtctctccaacgcagcccttgttcttcccggtggatgccagctgcagcggagtgttccggccccggcccgtgtccccaagcagcctgctggacacagccatcagtgaggaggccaggcaggggccgggcctagaggaggagcaggacacgcaggagtccctgcccagcagcacgggccggaggcacaccctggccgaggtctccacccgcctctccccactcaccgcgccatgtaagtgtccccgggggcccaggaggacaccggtggataggcttacggtcgacgtgagggtgggctaatttagaatggacgttttgcccggcagcctctcaggttggacttctcaggatttgccatttgttttaatccctgagaccacacagttgatgtttagagcctgccctgcatgtggtcgttccagtggaggatacagcatggggtctggcctccagcagggtcctccccaggccgcccctgggtgccgggagggcagccccttggcctgaggcccactatgacctgccccctgcagctgcaccgtgatggtggcttgcctttgtggctccctgggctctggtggcctcgagccctcttcccaccaggttgatggtggggatggggaggccagcgcagccatgtgtgcccagcagtggccgggggagcctattcctttgcactgcagcatcaaaagcgctgtcctccccccacaggtatagtcgtctccccctccaccacggcaagtcctgcagagggaaccagctctgacagttgtctgaccttctctgcgagcaaaagccccgcggggctcagtggcaccccggccactcaggggctgctgggcgcctgctccccggtcaggctggcctcgcccttcctggggtcgcagtccgccaccccagtgctgcaggctcaggggggcttgggaggagctgttctgctccctgtcagcttccaggagggacggcgggcgtcggacacctcactgactcaaggtgagccacgctcctcccacacttacctccaccttccccaggggaccatgtgtgtctctggcagtacgtgactttgtccgtgatggcagatggcaccccctgttctccaccgggcctgggtgggaccctcagtgctctgggcaggctggggtgctcagtgctctggtggctcggggcgtcacggcctgctgggatagacacacatgggtccctgagcacgcggcctccatggctggttctgaaagcacaggagacgactctgtgctgggcagcacctcccgacttggaggagggagggcccctggctgccagctgcctccacgccatcctggggcttaggtgccagactcctgtccagacgtgcttgtgtcacccgtcctttccttacccccaacctgaggcttggaaaccccttaagccaagggccgtggatgctgggctgagagccgggtggccgttgacctcctgattcattctccctgcagggctgaaggcctttcggcagcagctgaggaagaccacgcggaccaaagggtttctgggactgaacaaaatcaaggggctggctcgccaggtgtgccaggtccctgccagccgggccagcaggggcggcctgagccccttccacgcccctgcacagagcccaggcctgcacggcggcgcagccggcagccgggagggctggagcctgctggaggaggtgctagagcagcagaggtagggcctgcccccgccctgggaccccgggtgggcacacggcaggttatctcctcgaggaacctcatctgctaagtggttccctcctctctgtagcccagtgcacacccccgctcccagccagggagatgtgtggggcgtaggtcctaggtgctgagccatgggggtgcagcaggcgggcgtgtcctttaaagtccctgggtgggtgagggtggcggggagcgagggcgccttgtggccgcatctctgagctgctgagaaaccgggtggagaatgaaaggtggggcgcggtcagggatcagccacgcacctgccctcggcagccgcggctggcagctccacgggcgggccctgccacacgggcactcggaaacccgagaaccctgcgagccggcgcagtgaccacctgtcctctgttcccacaggctgctccagttacagcaccacccggccgctgcacccggctgctcccaggccccccagccggcccctgccccgtttgtgatcgccccctgtgatggccctggggctgccccgctccccagcaccctcctcacgtcggggctcccgctgctgccgcccccactcctgcagaccggcgcgtccccggtggcctcagcggcgcagctcctggacacacacctgcacattggcaccggccccaccgccctccccgctgtgcccccaccacgcctggccaggctggccccaggttgtgagcccctggggctgctgcagggggactgtgagatggaggacctgatgccctgctccctaggcacgtttgtcctggtgcagtgagggcagccctgcatcctggcacggacactgactcttacagcaataacttcagaggaggtgaagacatctggcctcaaagccaagaactttctagaagcgaaataagcaatacgttaggtgttttggctttttagtttatttttgttttatttttttcttgcactgagtgacctcaactttgagtagggactggaaactttaggaagaaagataattgaggggcgtgtctgggggcgggggcaggaggggagcggggtggagggaacacgtgcagtgccgtggtgtggggatctcggcccctctctctgggttcgtcgtggttgagatgattacctcggacgtctacggaaacgagcgggcgcattgttgtccgcttgtgtgtgtgtgtgtgtgtgtgtgtgtgcgcgtacattgattactatccatttctttagtcaacgctctccacttcctgatttctgctttaaggaaaactgtgaactttctgcttcatgtatcagttttaaagcagcccaggcaaagatcatctacagattctaggaattctctcccctgaaatcaaaacctggaagacttttttttcttattttagttgagaagtttcataaactgctcaaggattagttttccaggactctgcggaggaacggcaggaagaacctcagagagggcagaggtgacttcaaagtgctggggactccgtcctgagggtcacttggccctgagcccctgcgtgcccttgcggaagcccagaagcttcttcctgctgcacctcccgtttccgctgctgctgacgtttatgcatttcatgatggggtccaacaagaacacctgacttgggtgaagttgtgcaatattggaggctgactgtagggctgggcagctgggagacaggctcatggctcatggctcatggctcagggcggtgcctgccctgggccgggacccccctccccaccccccacctaggctttttgggttttgttcaaggaaggtaaagtgagaggtttaggtcagtgtttttaagtttttgttttttttttaaagcaaatcctgtatatgtatctacatgggagacaggtagacactacttatttgttacattttgtactacacgtttgtgttccaggtttcagcttccctcgctcctgttgttaagaagcgtccctgtcagcacaggtgtgcattgaggaaggggccccagggccttcgctccctcagcactggggtggaggcggcaggaaggggcggcccttacctggcaggtctgggcgcacctttagcaggtggactccgtggggctccaccagccagaagcctttggaaggcaacgaaggcaatgctgctccctgagtccagtccccgcccccaaacccagcccaggtgccttcagctacttcggcttcttaaaccctgcagtgttaaacagaggcattgagaaaggggaaaggcgggtatttttaaaagccaaagattgacccagttacttgagggtagggaggcgggcccagtgcaggaggctgcatccctggcctgctggtgcccaccgggggctgtgcctgtgccgggccgcagggaagctggctgcccccattcctgctgctgctgctgctgctgctctgtggctgtttcaaagactgggcgaaaggctgtccggagggcagaccaggtgccttgccgcagagaaaacaccaaagtctcctgttcgctcataaagaagtttttgggatgggagagaatccagaccatcttggggcagccaggcccttgccttcatttttacagaggtagcacaattgattccaacacaaaactccttcccctttttaaaatgatttctgttctaatgccatagatcaaaggcctcagaaaccattgtgtgtttcctctttgaagcaatgacaagcactttactttcacggtggtttttgttttttcttattgctgtggaacctcttttggaggacgttaaaggcgtgttttacttgtttttttaagagtgtgtgatgtgtgttttgtagatttcttgacagtgctgtaatacagacggcaatgcaatagcctatttaaagacactacgtgatctgattgagatgtacatagtttttttttttaccataactgaattattttatctcttatgttaacatgagaaatgtatgccaaatgattagttgatgtatgttttttaatttaatatttaaataaaatatttggaaggaaaaaaccttgactttttcccttcctctctctctcatctctctgggagctctttccttccaagcggcttccctgagaggccacatcctccaggcttgtagaagtttcaaatcttaaagaggagggcagggagccaactcctgcattccacctcactgcagggaactaatggccttccgtctgcagaggacccctccccctgcggcagccacaggtggccccgtggtctgccccctcctcaggacccttccccagtggccgggctcagtcactgaaagtctcagcaccgcccggggctgccggcaccatccatccttaccccatcctccgccaggttctctgagtctggttataaattaagcagttggaagaatctcacagccaaaccatttcctggtctctgaaagacttcaccaccttctagcaagagggcacacactgctgctttatgagaacaaaggacttgttcatgttgtcacctggtggatattttggttaaaaaaagctcttcaacctcttcgctcccattaaggtggtccttaccaaagtggaccccttgtgcgctgttggtgggagggtcaaatggcgcagcctttatgggagagcagtgtaccagctcctcaaagattagaaccaccacctgatccggccgctcctcctaatggtatggaccctgaagaactgaaggcagggcccagagaggtttgtacacccatgttcacagcagcatgacgacagccatactaggaagcagcccgaggggccgtcagccgatgaagggatcaagaagatgtggtcccgcctataatcccagcactttgggaggctgaggtgggcggatcacctgaggttgggagttcgagaccagcctgactaacatggagaaacctcatctctactaaaaatacaaaattagcggggcatggtggtgcatgcctgtaatcccagctactcgggggggctgaggcaggagaatcgtttgaacccaggaggcggagtttgtggtgagccgagattgtgccattgcactccagcctgggcaacaagagcgaaactctgtctcaaaaaaacaaacaaagaagatgtagtccatgccgacagtggaataggcctcagccgtacaaaaggaaagcccagcatggctgccagcgaggatggaccctgaggatgccgtgctcagtggaacaagcccgtcataaaagaacacacacgcgagggccctagaggggacagattcacagagacagaagggggagtggggggtgccgggggctggggaggggctgctgagccagagatgaatgggtgggaattgcagtttaagaggatgaaaagtgctggagttgggcggtggcgatggctgcaaaacagtatgaacgttcttaacgcactcaactgtgtaccgaaaaatggttaaaacgatacattgtatgttacgtttattttactacttttttttttttttctagccttgctttgtcacccaggctggagtgcagtggcgtgatcttggctcacggcaacctccgtctcctgggttcaagcgattctcctgcctcagcctcctgagtagctgggattagaggcccccaccaccatgccgggctaatttctgtatttttagtggagatggggtttcaccatgttggccaaactggtctcgaacttctgacctcacacttgaggtccgcccacctcagccccccaaagtgtggagattacaagcgtgagccactgcgccgggaccacaatgtttttaagaagaaaacaaagttttttctcaaggaggcagatgctcagtgagtgcgcagcagttcccatgaggagagcaggcaggagccatgggcaggggcaggcacagggcaggccactgtcagtgctgaggttggctgggcataagtgtggccggggccagcctcattgttcctggagccctgctcagacagggcgtcctggccctcgggagagcctgccctgcgacggcccctcaggcagctggatggtgggagaggccggggagggggctctttgtcttctgagtcatctctgcggttttgctgtctctaagaacaaagcagtagcctccgaggtcctggctgtggctgccgctggcttagtggcttgaggctgtctgacagggaggccaaaccagggctgagcactcctgagtgagcggaggtgcctgcttgggccatgcctgtgtgggggaatctggcaggggagctgggggcccacggagctgctctgtctccaggcagcctcgtcgctccaccccgcttagagtggggccgcctcaggacaccaaggttgggctgtgtggcatctgctgaacaaggagccgggcggctgtgctgagggcacctgtgtttattgtttgggagccttagaaaccaggaacctcgagtcggaacctcttgtcgtgtcgtgcatgcgaattcagggtgtgacctgcccatgtctcagctccccgacctagtggtcagctcctcgtggggacagatgtgtctcatggtgctccagggtactgaagcagccccagcaggtagcagctccttaacacacagcactggcaaaaccatccctgcgtctcccatgcttgggcgcttcttccagaactcctgatggtggcgaagacgatggcgatgatgatggtgatagaggcttagacttctcaggttgaaagttggagccccccttggggagcctcccacaggccttgtaggactccagaattctgccctgggccccttgatctgctcctgagtcatttcagtccctccactggggaggtcctgatgggtagagggagctggccacacccatgggtgtgtttgccccttgcctgagggtcctttatggcccctagcccacgtctggcaccgtgagcatcccccacccaccccgggcattttgcaggatgttctcgttgaggacatgttccttcctgctggggcttggccgggctgagccgggccctggcgcacccctagtactcgatggcacttctgagccatgcggggttctggggttctgggactttctttttcagtctggtgaggggccaggtactgcctggagcttcaaccaaagcaaatcaggtgattgccatgtccttgctaacacaagacggaggcacgcccagccagctgacatgcagagtggcacggtggctgagaacgtggcctccgttgccgcacgcctgagtttgcgttctggtgctgcagctttgcagccctttgtgacggccacgcgtgctccgggtcagcaggccgctcccgtgacaagggcgcgacatgcagggtgcacagtgggccctggggaaacacggtggcatccccgagcgccatccccagcaagaacggggccagacacccaccagggaagaagcaccctggttgaccggattgttggcgacctgaccgcctgcttattccgtcgtggacgcacctcctctcgcaggggtgggagcggaggccttcgcctggaggcgcctgggccctgcctctgtgcttttctgtcaccctgaacggctggcgctctcctcgctgggccgcgggataagaagaaggctttccggcagtccagaaatactggctcccaggagcaggactggcctctcggggtgggggtggggagagaggggatgccccagccagagggaggtccctgggcccagcctggagggagccgagggaagatccacctgtttctgcacgtgctcgcctccctcggaggcaggaactgaatctgacctaagaggaaccgactctcttggggtggaagaaacagagttggcctcttcgtgtttcttccggaataacaccggggtgttgaggcggcatgctggtgagggcttgggtgagcacagccgccctgcctgtggccccacctctgatcttgggaggagtctgctgttcggaggcgggcgggtcctgaggaaggtgtccaggtctggctcttcagagaccaggagggctgggctccgggtcctgcctgtgcagctggtgtggcgcctggcagagaagagagagggggagagggaggggagaggggaggacagaagaggaaaggagagagagaggagggaggcagagagggagaagagagggaggcagagagggagggagggagagaagagaggagaaagaggagggagggaggagagaggagggagagaagagaggagagagaggagggaggagagaggagggagggaaggagagagaggagggagagagggagagaagagggagggaaggagagaggagggaaggaggagggagacgagggagggaggagggagataggagggagggagggaggaggtagggaatgttcagtttctttcctcaggggaactgctggggtctcagtctgactcacttttttctaattattattatttcacgtatttgaatgtgatttctgttaaaaaaaaaaaaaaaaaagaaagaaagaaagaaacaagaaacaagaaaggacttagaaaaagtactcagggaacccaggtggccagaaatgctccattccccttttgtcctttgcagtgttctggtctggaatgaatgggcttccccagcagattttaggggcttttctttgaaatttgaaggggaaggtaccttcctatgatcacagagcatgttcccttccagccaagaggttaagtggaaagcccggggccctgggttccagagcggggggccggaagactgtgaggctcaggggagaacgcaaatccgtctcagcagaaatgtgccccagaacaaatcagctccaccgagctcccagtgacctgaaccaaatgcgtcgtctttggtgcgaacttcaaggagttctgccgggcaccgacctgggtcaccaccatcagaattgacgcacagaacacgcctgtcacccagaaagctcccctgggctctccgctccgtgcccttgccgtgttcccggccccaggcaacggatgacctgcttcctgtcactgggcatgcgtttgcattttccagaattcctaggaatggaatcagacagcgtgtgctcctgatgggctggcttctctcactcagcataattaaacgtggcttcctccacgtgccgcgcatcaggagctcattcctgtttcctgctgagtcgtgttccgtggtggggaaggccaccgtttgtttacccactcacctggtgatgaacgtttgggtggttcccggcatggggcgattataaatgatgctgctgtgaatcctggtgtggacgtgtctcatttctattgggtaatgtaggccaaggtgcagaggctggctcgtgtggcatgagagcgattcactcaacagaagccgcccagctgctctccaacgtggctgctcctatttgcgttcctgcccaccacgtacgagagctccggttgctccaaccctcaccaacacttagcgttgttagtgttttaaattttagccacttggatagtctgtcgtggtgtcttatcatgattttatcttgcattttcctgatgactggtgatgttgactgtcttgtaattagccattctatttttcatatttatttgcatctttgctggtttttgtttttgttttttgagacagggtctcgctccgtcacccaggctggaatgcagtggtgccatcttggttcactgcagcctctgtctcttgggctcaatcaatcctcccatttcagcctcctgagtagctggaagtacagacatgcgccaccgcgcctggctaatttttgtatattatttttggtagagaaggggtttcacgatgttgcccaggctggtcttgaactcctgggctaaagtgatcctccagcctcccaaagtgctaggattataggcatgagcccccgtgccccacctttgctaatttttattgggttgtttgaattcttattattgagttgttggagttccttatattctgaccttatattctgaacccaagtccctttgtcacatgagtgtatgtgtctgtaccctctcctcctgccacacacagaatatttctctcccttgtggcttgcctttcatttgaagagtgaagagttgaaggtttttattgttatgaagtccagctgatcatttaatcttctgcagctggtgctttttgtgtcttatccaagaaagctctgtctaccccagtgttgggggctctcctgtgtgcccttccagtgggtttatgctttcagccttcgtgtctacagctctgtccactttgagttgatttttgcctctggttcgggatagcagttgaggtttatttttatttttttctgtggataaccagttgttccagcgccgtttactgaaagactccgctttgcccattgaattaatatgacacatttgtgagaaatcaagtaaccatcaactcgagagtctgcttctgggctctgctgtgttccgcggatctatctgttctgtggcacagcacatgtcttttttttttttttttttttttttttttttgagatggagtcttgctctgttccccaggctagaatgcagtggcgcgatcttggctcactgcaagctccgcctgccgggttcatgacattcttctgcctcagccgcccgagtagctgggactacaggcgcccgccaccacgcccggctaattttttgtatttttagtagagacggggtttcaccgtgttagccaggatggtctccatctcctgaccttgtgatccgcccacctcggcctcccaaagtgctgggattacaggcgtgagccaccgcacctggccagcacagcacgtgtcttgattattattatcctcatagcttaaatcttaatgaaaccaggtagtggaaatcatctaattttgttctttctctaaattatttttgcttttttaggtcttttacatttctgtatacattttagaatcagcttgtcaatttctgcaccttgtattgactgtctacttgtgtagaattgttattatttgttccttgaatgtttgagtccctaaatgcttctttaaatcacggaaggcatgtgggcctagtttcttaatcagaaggttttgaatcccaaattcagtttctttagtaggttgagaaccattcagatctgggatttcgttttcgagtgagtttgaaagttcgcgtctgtcacggcacatgctcctgtcctccgggttgtcaggtctgttggtgtaaagtccacaatattctctctctctctctcttttttttttgagatggagtcttgcttgctctgtcgcacgagctagagtgcagtggggcgctctcggctcactgcaaactccacctcccaggttcaagcggttttcctgcctcagcctccagagtagctgggattacaggtggctgccaacacacccagctaatttttgtattcttagtagagacggggtttcaccatattgtccaggctgttcacgatcccctgacctcaggtgatctgcccacctcagcctcccaaagtgttaggattacaggcatgagccaccacacctggtccacaatattcctttattacctttctgttgtgtcgaatctgtgctaatgtcttccatttcatttctgatattaaaggtttgtatttactctcttttatctttttgattggaagtttatcaatttgttttaattttccaagatccacccttgggttccatggattcgctttattgcttattcattttctatgtagttgatttcctctctgtattatcacccttttctacttaatttgatttgaattttctcttctttagctttttaaaagatcaaatcattgattttatatcttgtttctgatataaacatttaaagctctgatttctcaataagcacgcctttagttacatcctgtatgttttggtgtgttgtgtttttattttcatttagttcaaaatgttttctgtttttaggctgggcacggtggctcatgcctttaatcccagcactttgggaggctgaggcaggtggatcacctgaggtcaggagttcgagaccagcctggccaacatggtgaaaccccgtctctactaaaaatacagaagttagccggctgtggtggtggacgcctgtaatcccagctacttgggaggctgaggcaggagaatcgcttgaacccgggaagcggaggttgcagtgagccgagattgcaccactgcactccagcttgggcgacagaccaaggctccgtctcaaaaaaaaaaagcaaaatgttttctgtttttcttgtaatttccttctttacctgtgggtcacttagaaatgtgttccatttctaattatttaatacttagccatttttaggtaacttttagttgttaatttttaatttacagctgactgcttgggtctacaccatgtgccctgagaaaagcgcgtattctgctgcggtcgggaagcctccagacatccgagcgagctggagatgctgtttttggagctgtctacattccactgacctgtcttctttctctgttcattgctgggggaagagcgtgaggtggcggacgaagctcgtgccttcatctgtgtcttcactgctctcatttccagctgcatattttgaagctttccatcacgtgcgtgcatatttaggactgtgggtctccttaacaggctgaccctttcttcactgatgaactgtctccacgtgtcttcgtccatcttccttgccctggagtctatgttgcctgcgatgttcgtggccgtgccagccgccccggggtcagggtttgaatgctgtatctttgaccatttctatatttgcagtctgtctttgtctttcaggtgtgattcttgcagacagcatactttaagtctttgatttttagccagtccaaccatctctgcttttcattggtgagtttagcccatttagcagcctttttttaaacttttttatttccataggttgtgggggaacaggtggtatttggttacgtgaggaagttctttagtggtgatttctgagattttggtgcagccatcacccaagcagtgcacactgaacccgatttgtagttttttatccatcacccccttcccgccctttccccctgagtccccaaagtccattgtgtcattcttatgcctttgcatcctcatagcttagctcccacttataagtgagaacatacgaagtttggttttccattcctgagttacttcacttagaataatagcctccgatctcatccaagttgctgcaaatgccattacttcattacttcttatgtctgagtagtattccatcatatatatatatatatatatatatatacacacaccacagtttctttatccacacgtaggttgctgaagcccatgtagtattgagtgtagtgaatgacatgcctgtgtttcttgctctgtgtccagttggtttgtctggtctcctctttgttcctgggaatgtcctcttttcatgtcatctcctgggtcaactgtgcgttaattacccattgtatctctacgtgggaaggggatggggtgcacacgcctctgtccacgtcttcgtggtcagatggtagacgccgggccacagcaagcattagggaggctgtgggcttgcctgaaaccatcactcttactgtgtttggtggaatggtgttcttataaaatttatttttatgataacaatgacaaaacacatttgaaaactactaacaaatgcaacagcctcaattggtagatgtggcaatgacagcttctctaggacggggtggatctgtgtgcctacaagtcccaagcctgcaccggagccagccagttccggctgtaggatttgccttgccacgcgtgacgtctggcacctggcggctcttccctgcaaagccctgcagcctcgctgagctgtagaactgctcaagcccttcttttccagctgccaggagggtgacagctgtgcctgcccccgggtgtctgaggacatagcaagggcaggcctggggcgagcctggtgggggaacccaggcaaacgtgagccatggctagtcacagttgggaagcttgtcctgggatgtgtgcagcctggttacgccaacgtgtacatcaactcttgccagggaaaggtaaagctcggggcccagaggcctgggctgaatttcagcccagggcagctaagcccagctcccagcccctggtcctggacgtgcctgctgtccatcttagcaggccccatagagcaagtaggagaaggaaacgggcttgccagcagggccaactgtccagagggcatagggcagccttcccatgtgggcaacggtcggcttactggtgcggagctttctaatgccacagtagggccagccaggtccctgagccaggtcctcgggccagccccagggccggcccaaggccttttctggcactcagctggatcaaaggcttggctttcaaaggggactccctgggcaaaggttgcagtttccagtatcagtggtgacggggtcgggcctggctagaagggcctggagccctgctggccaccaccctgcaagcccgcctgacacctggagaaactgggggctctgcccaccctttcccatgcccaggggtgcaggcaggctgtgccatggcattctgggcaggtgcgttgaagacgttaaatgggcgagttccctctcggcatggggtataattaattttcctgaaataggcatgacagcccagcagtctgcgtgtctgagtcaggcagtgattattacctctcaccggcatgatgcgccatcggccactcagaattcagagcaccacagctccccgggccctgctggggtggtgcagggggttcggggctggccagggcttgggagatgctaccccgctcagaaccaccctgcctggaggcttgggatccaagaggcgtttgtggctcccaggtgtagggttggcaccaagggtggcgggaaggttacagcaatgggtgagggagcgggagggtccagcagagcttgcagggggtggctggagctgcccttggtgagtggagtggacggccaggtcctgtgggggacgggggcgcaccccagcacacaccccggcaatgcccccagtcgggggaaagagcccgggctccagtgatgtgggctggccacggtcggtagcagtggtccgagtcgggtgaagcttgccttcgcgtgttctgggccacagtgctgtggggtcaccctctggcccccacaccgggcagtttccgggagcaggagctggaagtgcagggcaggctcagcccagtgggcggtgatggctgcctggccctcccgtcacagagcctgtggtggctctgggcacccctcctacctgggaccgagctgtttctcaccccaggccttgctgaccgtccaggtctggggtctcccggggacgcgctctgcatgtgggatccatctgtattccagggtccctgccgtggccaggctctcatccctaggggcttctggtctcgtttctaccccaaggaagcacccacagcaggtgccctcagcaccctcccttctgcttcctggacccagcgactggcttctccccactctcctgattgcatatgctcagaggcctgtcccagaggctttggccacagtggtttatgtcctgaacgccactgtgcccaggcccctggggatgttcccccctgaggttgtcatcgcagcctccctgctttatgggtcaggaaactgaggcacacgtggccggaggaccagaggtgggtgggagcccccggcagtgctcccgtgatagggctgaattgtccctgcctggcacccagacagagcagttggcgtaagcaggggtgcatgtctgcccgtccagggtgggtgtcggccctgagggtgcagtcgtctgcagctgcaggaccccaagcccctcagatgggagatggttggactctgggacgttccccagacgcaaggctgggggtgtgggcctctggatgtagaggctggctaggctgccttctcccacctcccgttcctggggctcatcttgctgtgtcaaagggtgaggcctcatgcgtgggtaaggtggggagcaaagcagagattttgtcctcacaggggtgcagatggggaaactgaggtctcaggttagctgggaagtacataagggtgtcgtcctgcagctgagcggagtggccggccccatcttcctccttccctcgctgggcacgggcaagctgtcccggtgacctcaccaaggcctctctgtcagcgcacttcacagagggagaactaaaggttgaagccttcagtccagatcacagaggcggtaaatgtccgagcgggtcagaccctgatgctgcagccggacctcagagccccctgggcagtgacgggcctctagggcatcctgggttttgttgcctgtgctgccccccagggcccctcctaccaccagagatgctgcctgagagcggggctcagcgggtggccaggcccctctcccaccccgcccccgcaggaggaaggccttggcgtttcaaggtcggcctccactttcactttctttttaagaaggagggtattatgggttgaattgtgcccccaaaatggtatgtccaggtcctaagcgctggcacctgccgtgatctcatttgaaaatagagtctgtgcagaagtcatcaagttaagatgaggtcatacttgagcaaggtgggcctaatccctgtgtgacaggggtcctgtcacagagacacctgacaggaggggaaattgggacccagagtcacgggcacgagggggacggacgtgaagacggagactggagtggcacagccacaagccaagggccaccaggagctggaagagatggacgaggcagggaaggatcttccgctagaacccatggagggtgcgtggctctgcccacatgttgattttgaacttctggcctccagaattgtgatggaatgaatttcggcagccacaggaaactaagaagcccaaacacgccggttcctatccgtgaaggacaaaagacccacgcgttgagtcaccagggctatcagggaagagcctgggccggggtcctagccccagagcccagaatccccgcttccagttctcagctgccccgtggtgtccgccctcctgccctctccacgctccagggccctctttttgtaaagaagaaatattttcctcatggaatgactccctcctccaacccaaacaggatcatatttctgctttgaaacagacacttctgctgtgagtagcggcatctttaaataaacacatcctccctgttggggtagacagaggcagatggagagacacagaaaacagcgcgcagagcccttgcttgcgggtgggatccgcgactccacagcctccccttccctgcccacttctgcctcctcctctttgtggggtgccccagggctctcctcccccatggcccccagaaacaaccttggggcttcttatgtcctgcgacctcctcggagctgttctgggggctcttggctgtcgcagcaaggagctgcactgaagtgaagtgctttccctgggaggtgagggccttggcaggcgggactctcagaaggctggacccaaggggggacacgggctgcctgttcctgctgaacccacacaagctccgtttccctcctcctcaggctgcccggaagcccccgctacgtcctgggaaatggctcctgggtctcccccaggcttctgggaccttagcctcgcagggctgctgggggtgggaggggcgccttgccctggacacggcgagggaagccactgtgagggcaggctctggctgggaggggctgctcctgctggatgggacagcggtgccagccgggcatggggagggtttcagcagggggcaaacctcgtggggagttggccactcagggcaggccagggagggcaggaatggaggtggaaggcctctggggcaaggcagggcagggcttaccccaccccaaccacagaagggcctaatcaggggtggaggaactggtgggcctgtgtccggggccagcccggtccccagtggtgtgactggggctgggtgtgaggctgtggtgagaggggctcattcctggcacgccaggtactgctcctgggccacagaacccaaccttccagcggtcagggtctaggctgctgataggcactcgtcctggcggccagactcatgggctgcgggtgaggaccccagcagatgggtcggggcgacctgggatggcggagggcaggtggggaggctgtgggaggtgcctgctgggagggaaaggactgtgctccgtgcccaccccgggggctccctgtcatcgctccgctccctctggcctacgcatccacaggccctgcccgtccacccgtgcattcggtttggtacaaaatcccctggcaatgctttctgtgggggctgattcttaacacccctccccttccgccaagcaggccctgtgggtctgttgaccgggagcacagagggcctagcggacagctacaccccagggtggccttgggcctgggggccccggaggagcgggctgtcagcaactcccagcagccaggcctgtgggctgagatggtggcggtttcctgccctgcctctcctcccctccggggtcagggggctcctctcctgaccttgtacttagaaacgacacagcgtcccacagagcatcgccctgtgcctctgggggccgggcctgccccaagcctcacatgccagcctggcactgctgctgccctcgggcaggggccctttctgggtcggggacaggtggtctttccccacttgggaaagagggaagtgaaaaccccagagggaagtggtttgccccaagctggcagagcgagtccggggcaggaagtcacagtaggcaggggtgccggagccggcgagagggggccggcgggtggatggtctcagttccagagcctcaggggcctccagtgaggagcacagggcccctgcccaccctgtggccagaaccctggacgcacgtggcagccgctcagggccccaggagagcgtgtcggggcaccctcagggcagcaccccggcttcccgccccctcactccctggctgcaccaggctcagccttccggggatgggcgacactgcccctctcccgatccccaccgcggggtgcagcctggcagctccctggccagacgcaaggggactgtgagagagagacgtccgggttactacgcgtgggcctggcccagtcagccaagcagatgcagccgtgtggtcttgggctctgtgagctcgggagttcccgcacagaacgcgggcctcactgtctcctctgcccgcaaattccccggcatgggctgcgctgctgctgcagaattacccagccccaggaccggtgcacggtcagcagaggcccgggcccgccttgtggaaggcgacatatcggcagtgcccgacctaaattcccaggcactgtggccaggtgggtggcctcccgtgaagggctggctgcccacacctgggtcatgaaccctcacgtcactcgcgaggcctgcaccacgtcgccggggcacagaggaggaaactgagcctcaggacttggcctgcagagagaggggtcgaagtgtgccccccaaagcacccctcacaccccagtccccccacttcaccccaaatgaggtaggtgtccacaggggagagtgggggcagccctggggctggctgagggtcacctgcagggggtcaggagctgctgcggagaagggagcgtccacacacatctgcacacgtgcacacgcacacacgctcacactcaccggcaccgaggtgcaccgcctggccgaaagctgtcttcctgtttactctgacctggtccctaccacaggcttgaagagcaaatgtttttgtctccatcgtgcagaagaggaagctgaggttcagaggcattaagtgacccacataaagttgtccagcatgtctgatggggttggccctagtgactccaggtcaggagccagagagccccagggggagtgttggtgaccgggcgggctcccggcaggagaagggcacctcatgttggtcagcatgagtgtggggtagaggtgacctgggggaaaggtgacctgggagggaggtgaccacagggagaggtggcctctgggggaggtgaccacaggggaggatgacctgatgaggagatacctggggcagatgaccacaacagggacctggccacaggaggaggtgacctggtggggaggtgacctggggggagacaccctggtgggaggtgaccacgggaaggggtggcttctgggggaggtgatcacagcggggagatgacctgacagtgtcaggttatgtgggggcagatgaccacagtggggagctggccacaggaggaagtgacttctgggggaggaggccatagtagggtggtgacctggtggggaattgacctggtggggaggtcacctggggggaggtgaccacagtggggagtgaccacaatgaccacttctccaagtggccacgggaggaggtgacacaggggggtgatggctttgggggagtaacaccagccctgcagaggaggataagccccttgggaggaggggtcagggaggaggaggtggcccactctgtggcctcgcctgcaggggaggccctgtccctgcgctccttagaacagacaccctgggcggcgggccccttcctcctggcctgcaggtcggcctgcagtggagtgctaccacagcctggaatcctcagtactggagcctctgccacccagctggggtctcacgctcagcccccgaccatccccagaggccaggccacctgtggttctggggtcccgaggctcttgggagcccaagctgctggtgtgacctgctgcagctgctgccagccaggcagggagagctgagagctgagcttgccctgtgcccaggagggtggactctggcaggacatggcccggaggtgggaggggcgtgtgcccgtgtgtgcttgggcacggtacccggtctgaggcccgtgttgtctcgggcaaaatgcgcacactgtcttggaggaggcgggccggggactcctgcgtggcccgaggaagctgaggggaggtagtccctgatgccatcagcctccttgctccggaaaccaggtgagtgcagattctcctacctggctgagtggagtcctgcgcatccagtggagagaaatggaagtttactgcaaactgggggttccccgcagccttggtttatggttaaatattacagaggccccgtgggagagccaggccccttccctctgtgggccctgaagggggccacagaagcaacaccacggtgtggggggagcaccgtcccgtgaagctcccgctaggccgaggggctggggctgtgctcgccatcctcggccaccagcctggctttcgggtccccacacacaggcaagagcacgggaaccgcatcctgacctgccagctcctctccagaggctcggacccagatggggctggattggggcgggaggaggcgcagtggccagggaagctctggggcaaatgccttccaagtgactcatcggggctgggtccctgaagcctgccatccaccccagctctactctgcctgcgcggcctgggagcggcgcctgtgcccttgggttgaggacaccgattagcaggcaaggcccacacgaaggtgtcgccttcttcgtcaactgaggcccagtgtggcttcctggagttgtgaacagctcctggcctccctggggctccgcagctgggccttccctgcatctcggggtgtaaaccagccccaggaaacaggcggagtggctgcagcatgggtcaaggtcagagaatccgggagccccacagccggcagggctgatgacatgagcttcagggcccagcgcagaacagaaacacggccgttgttttaagagtgtccgacagtgaccatgggcgctataccaggggcaggcccctccgagccgcgctggagcctgagggctgactggccgaagagctttggtgggaggagcgggatgtagccgtggctcagttaggggccgggagaggaaggccgcgcaggtgtcctctttgctgctcagggccagccagcgggagggttcggggattttaagaggagacactggttctgcgtccccctcacactgctgggagagaacacaggaggggctatttgtgaattatgtctggttgctgtgagtgtgtgtcgtgggtgtttaaccacctctctgctccaagatggaaagtggaggtgctgctcccaccatcaccctctgccttcctgcacccgccccctccactgcctgtggcctgcatgcggccctcatggccactgtgaactgtatgtgccccgacctgctcccttgcctctccctgaggctcatgcagttttcttgcctggaaccctctgagggcctttgcctggagagctgctgtcatcctttaagacctgagtcctgcctaccgccttatttccacagcacctctgcacacccctgtctgcgcacctattgtattaatccggcattactgcaggagtgctgtcctatctgcggtagggagagctctcttggtgcagaatcccaactcagatgaacgtaagccaaaagggagcctgttggcttattataactatctcacccaggcgcagctgcaggcatggctggatccaggacctcaataatgcactcaaagctctgtctctctcccggcatctcagccctgcttgtctttacttgacttcattcagggtgtcagctctctctccatgcagtgggggatggcctctggcaatcccaggttagcagccctgatgagaagaggccgtttttcccttcactctgtggacaagtctcccagggacttccaatggtgtagcttgggctgtgtgagctcccaggactgatcactgcggctggcgagggagcacgcgcctccttataacaggatagggtcagcctatagaaaagggagacttatctgctgccttgcaaaggggaggacggaggctgggcagtgtgtgcacctccccagccaaatgggcgagcactgtgatggagggttgtgcatttccaggctctcggtatccccagccccttgcccgtgcctggcgcataagtggacacaatctttatggaccagtcaccccgctgcaccagggactctttgaccaaagagagtggagcatgtgggccctggggacacggtgtggtggccggggtttcttcatgcagcctcctgggccttggctctccctccgctggtggcctggagggacaggaataaattttgcagcagaattgaccgcgggggagggaagggcttccttgccctggggcccttctcacagttttcatctcgctcagttccaagtcaaaacctctggcctgcgaagctcatttgggaacagtgggagagcagatctgaaccggacacggtcactggttgccttggttattctgggcaggacacgtggcgtcagcctgggcagaggggcagagcctcggggccatggtttagggtcctggatccagccccgtggaagctgctctctgggtgctgccgtgaaggtggcaggtcccctttctgactgaaggtccttcgaatccgtgttccaggctccaatcatagaagccggagcaagagagccagagctttgtaggaatttacatggaaacgctttctgctgcctgtcattgctaacaggaccgcccaagtcccggggtggactgtgaggccaaatgaatgtggttgccattgagtgggagcttcctcagcctccctgcactggctgggggtgcatcctcccaaggccctctgtccctgagggcctggagaggccctctgctcagcaggggctactgagcctgcccccaccccacgaggagctgcagcgacaggattgcaaagacaccctaggccccacctactcttaattgtggggaaacagcaccaaccccagtttgcagtagtcggacgggtttctagctcactctgtctgaacgtttcccttcctaactcctttcttcatcttctctttttatttactgggctataaattagctccttaaatcagacaaatacatgcacactgacaaggtttggctctgtctcacccaaactttatgcagaattgtcattcccagtgttggaggtggggcctggtgagaggcggttggctcatgggggtggatttctcatgaatggtttaggaccatccccttggtactgtcctcacaacagtgagttctcgtgagatctggtcattttaaagcatgtgcaccttgcccccactctctcttctctcttcctcctgctctggccatggaagacacacctgctcccctgttgcctcctgccatgattggaagcttcctgaggcctcctcagaagctgatgctgctatgcttcctgtacagccagcagaaccatgagccaattcaacctctttccttacaaattacccagtctcatgtctgtctgtctttcattctttcttttctttctttctctttctttctttctttctttctttctttttttctttcttctttccttccttccccctctctctttctttctttccttcctttcttccttcttccttccttccttctctttctttctctctctctcttccatctttccttccttccttccttttttttttgagatggagtctcactctgttgccagactggagtgcagtggtgcaatctcagctcactgcaacctccgccttccaggttcaagtgattcttctgcctcagcctcccaagtagctgggactacaggtgcacaccagcacacccaactaatttttttttttgtatttttagtagagatggggtttcaccatgttggccaggatggtctggatctcctgacctcatgatccggctgccttggcctcccaaagtgctgggattacaggcgtgagccaccgcacccggccttgtgtatttctttatataatgcgagaatggatgaacacacacactacctgtcattgtttttcttagaattctgcaggccacggacatggccgagcagctggagcccggctgcatccgtgctgtctacaccggcctgggctgtgctgtctacaccggcctgggctgtgctgtctacacaccgtcacctgcctgggccgtgctgtctacacaccgacaccggcctgggccgtgctgtctacacaccgtcacctgcctgggccgtgctgtctacacaccgtcacctgcctgggctgtgctgtctacacactgacaccggcctgggccgtgctgtctacaccggcctgggccgtgctgtctacacaccgtcacctgcctgggccgtgctgtctacacaccgtcacctgcctgggccgtgctgtctacacaccgtcacctgcctgggccgtgctgtctacacaccgtcacctgcctgggccgtgctgtctacacaccgtcacctgcctgggccgtgctgtctacacaccgtcagctgcctgggccgtgctgtctagacaccgtcacctgcctgggccgtgctgtctacacaccgtcacctgcctgggccgtgctgtctacacaccgtcacctgcctgggccgtgctgtctacacaccgtcacctgcctgggctgtgctgtctacacactgacaccggcctgggccgtgctgtctacaccggcctgggccgtgctgtctacacaccgtcacctgcctgggccgtgctgtctacacaccgacaccggcctgggccgtgctgtctacacaccatcacctgcctgggccgtgctgtctacacaccgtcacctgcctgggccgtgctgtctacacaccgtcacctgcctgggccgtgctgtctacacaccgtcacctgcctgggccgtgctgtctacatactattgctggcccagcctcagccctgggatgagtacagactactttcttttggccaatcgcagctttcagccagccccgtcatactcccctccttgtcccttacagcccctgggacagactcccctgagtctgctcactttctttttcttttttttttttttttagatagagtcttgctttgttgcctaggctggagtacagtggtgtgatctcggctcactgcaacctccgtctcctgggttcaagcaattctcctgcctcagcctcccaagcagctgggactacaggcacccaccaccacacctggctaatgttttgtatttttggtagagacagggtttcgccacgtgggccaggctggtcttgaactactgaccttgtgatccacccgccttggtctcccagagtgcgttgagccaccgcacccggccgtctgctcacttttaactgtggaaatgcagcccagcccagctgaaagctcgaatcttctgtcctgctcatgctcccctgccccggggtgaggctgctgtctctccagacttggggtggggacagaggtgtgcgtgctctcctgctcgctcccctccaccctctgggctggtaccctgatgagccaccagctctgatgactccgacctccctatccccacacagaggctggggctgcggctgggtgactggcgggtcagtcctgctcagccctgcaggctgtgtgtctgggtctaatgagtttcttagaatgtggagattgtgctgggtggtgttgggggttgcttggaacctctgtcattttcatctgtggaccttagtcatcaattccgctgctctagtaaaattcctactggaaataaaaccctgcaccacccccctctctctgtgggagcctccaggatgtctctggggtcttccccgccagcctccatagctgtattcatcagggttctccggagaaacagaagcagtaggagacgggtttatttattccagggaactggctcatgtgattacagaagctgagatgtcctgagacctgccacctggagacggaggagggcctatgtcaccatctgagtctgaaggcctgagacccaggagagctgatgatgcagccgagttcaaatctgaaggctggacaagatcccatcagcttgaagaccttcaggcagagaaagtgggctctccctccctcagccttttgttctgctcaggccttcaagggattggaggatgcccgcccacgcaggggacagccatggactttcctcagtccttcaactcaaatgctgatctcacccagagacagctcacagataccctagagaacatgcggccaaatatctcgccacctcttcccagtcaaggtgacacatgaaattggccatcacagcgtcctggtatcattgtatcagagttggcctgtgtgacagtgagtgatgtccaagcctagttcacaaatggctttgtggatcccaccttgctctccctggggtcactctgggggaagacagtcgccatgttaggagaatgctcaagcagccttgtggagaagcctatgaggccagggactgaggcctcccgccaatagcctgtgaggagctgcagcctccaccaatggccttgtgaggactggaggcctctccccagcagccatgtgagcaagcttccttggaaacggatcccccagcccagtcgcacgtgcaggtgttgccgtcctggcggcaacctcgtgccagatcctgagccacagccaccccactgggcttcttccaaatcctggagcctctgaaactgtaagataatgaaggtttgttgttttacactgctcagttttggggtaatttgctacatggaaatagaaaacacacacagtctatatctgtatgtgtatatgttttatatattctatatgatatatttttaaatagggttttcttcccaggatgggatcttactgaacattcttaaaaaccaattaattttagacatgcccagctgtcccacatttccatagaggaagggcaggagaattctctaaatattctgtgtgttttccttcaggcccagcgtccctcgaggtgaggttgggaccatgtgaccagccatggccaatgggctctgagcagaaggaccatgagtcggcttgccaacacactcagaggttgcatgcctcctccacaggcccctctctgccgtgggaccctggaggcatgtctgtgagggcggcactaggagatggggaacccggccccccagtgaccctggaggagggccctgacaatccgtgtgctgcttgccctagagagaaatacgctgtagcgcgattaagctgtgagattttggaggtttgcttgttactgcgtcacgtcacggcccagcctctcctgactcggtgcagcagataacaatggcagtcaaagcaccacgttatctgttctgaagaaagtggaactttcttctgaaaatgcaggtggcctcagacactccgggaggcgttctcaatccattgcaacactttgtgggggaaattgcctgagtcccccagctcgtccatctctgcaccggagactgtacggggtgaaggagggtgtcttaggaagccactgaggcatcgccagagcccgcacgggcagcgtcaggcaccccaggaggtcatttcacatgttctacaaggacatgttttcagctctccagttttctagtggaggaaaccaaacctcccaggtggtcaacacaggcgtttgccccacatgccaccaccaggtagccacgggtctcatgggtgactgggaatgggaggggaaggaagaagctcttcttttgtggaatctgatcacagggaaccctctcccgcccggggctcagaatctgatcacagggaaccctttcccgcctggggctcagaatctgatcacagggaacgctctcccgcccgaggctcagaatctgatcacagggaaccctctcccacctggagctcaagatggtttcctgcagacctggaattaaacgtcaggctcctgcctgagtcgccgggacccccagcctggctgacctcttcttgctctgctgagctctctgcatgcccccaaggccctctccgcctctggctcagcccttaggaagccctggcagagaagcccaggatgggagaggcaaaatggggaggatgaggtttgcattacctgtaatcctggccaggccacagtacctaagtgctcaaacatgagcccaggtgtagctgggaaggtgtcctgcagaggagctcaatatccacaatcagatgatctgaaggagattagcctcgatttttctgggagggactcatcccttcaaaggaagcccttaagagtgaaaaccgaggtttcactgagaacacctgcctcaagacggtgacgtgccctactgcgtgtctcctgcctgccgcctgccctgcaggttttgaacccccatgattgcgggatccaatgccttaaaataaatctctaaacatatatccgtctaggtaaaccgcctgttgtctaaacatatatccgtgtatgtaaaccgcctgttgtctaaacatatatccgtgtatgtaaaccgcctgttgtctaaacatatatccgtgtatgtaaaccgcctgttgtctaaacatatatccgtgtatgtaaaccgcctgttgtctaaacatatatccgtgtatgtaaaccgcctgttgtctaaacatatatccgtgtatgtaaaccgcctgttgttgtctaaacatatatccgtgtatgtaaaccgcctgttctctaaacgtatatccgtgtatgtaaaccgcctgttgtctaaacgtatatccgtgtatgtaaaccgcctgttctctaaacgtatatccgtgtatgtaaaccgcctgttctctaaacgtatatccgtgtatgtaaaccgcctgttctctaaacatatatccgtgtatgtaaactgcctgttgtctaaacgtatatccgtgtatgtaaaccgtctgttctctaaacatatatatgtgtatgtaaaccgcctattgtctaaatatatatacgtgtatatgaaccgcctattgtttttttcatgtcaggaaagccgggacaaatccccctggttctgtttctcggaagaacgttgcctgttaagggggcgtttccactgccctccaagggcttgggactcactgtgtcctttgtgtgtgtcaggggtggggagcggctcctgtccaggccttcttaccgacagctacaaggcttgggtcggcactggctcctgccctccctctccaggccttgggaagacgcggttctcctgcccgggctgccccttgagcacccatccctcctggtttcccaagtctgtcctgttcttgtaattcctttattaaatgctccttaagtgattcaatttgcatgtaacatctatttcctgccaggcccctgcctcctgcctggcactccccgttcaccccacagccaactgccatcgggatgtgcccaagcctcgcagcaagagaaatctggaggccacgttcaccgcccctcagacgcaaccccagggcgtcagcaactggcgaggccttttaatcaagcaaactcagtcctgcactgcacacggctttttgcttccttcgtaatggctagcatccataagtaatcatccaaaagtgcagtgtgtgagaaaatcagaactgcacggtctactgggcattcaccccaggtagcgagctcttaggctcccggggggcaaggacagggaggaggaagggagggagggagggaggaagggagggaaggaggaagggagggagcagcctcccttggcgctggggacggtggctccattctcatgaggcagagagctctggcttgggaaattcctgggctggagggatttcctctcctcatccttggaggtcgtgcttcctccagaggaattgtggagccccttcctggctcttcccagcagggatcccccttcccagtgtctcctagcatcccctgaactggagagcctccccgctacctgggctggtcgctgtggaaaccgtctcacagctgaggggctggctctgctggaagtgggaagctggcagcatttccctggagcccggcccaggggtttggggtgggctgagcactcgcccccagggctgtgccacacagaggcgggccttgacttgtttagaagtttgacatttcgttcatcatgaattgtgcattaattttaatttttaaaagtattacactaaaatgttattgatcttgatttttttttagcaccctcccacttaagttttgccccaaaccaagtgtctggtccttccggctttttgggacaaagctaggagccgggtggagagaggagctgggctttggggcaggcaggcctgggcgagccctggccagccccgtgcccctgggcagtgtccttcgcttccctgagcctcctgtccctgacgccgggcagggcgtgggaggtgtgtgatgcagtggggaccacgtggcactcgccagcctctgtggtcactggaacaaggccgtgtccagaggagaccgactccccatgagggcaggcgtcagggctttcgctcctcactctgaccctgtgtcggtgcttggtggccccacagaagcccagtaaacgccagtcaccaggaagggccccacccacccatcccagaccccggaggtccacggagcagcaggagggctgggcagtcctagcggcaccaacggggcatcacagctcttgtcgtcttagggccgccgctctgggcaatgtccgggaggtgcctggggatggccaagggcttctgaagcaggagagacctgaaggctgggctggggctgcagaagtggccacaggccaatgtcatcccagaaggccctccatgggggcactcctggggcccgcccagcagccaggccccgggccgagatgcccggatcaggaaagccctgtggggttggagacttcctctctggctctcagcaacacaggagcacgctgtgcccacccaccccaggtgttggggtccccaaaaccacattttggggcaaccacattttggttccccatgtgtttggaacttgtctgagcatcacctgcctgatcctagatgtgcaggacactttgtgcccagtctctgcagggtcccccaaacgttgaccctcagggacttgttcttcccattttataaactaaggcagagcggctgctcctcacttctctgccagggccaagggaagggctttgtctcatcacctaccctgggacaggggtggtgactggtcggtgaccaggaggccctgcgtggtttggtgacttgcccacagtcacccattgcaggcccgtgtggagtccacctctggcctctgccctttgctacatgagatctgtctgtggcagactcttctggaaacttgagccagcgggccggaggctgcaccctaaacccccggctgtgcccctggcaggcaggcgggagacagcagcaaccagcccatgggctgtgggcatcctccagccggtgtcccatctgccctgcaagcagtgcctgggctcagagcagcccacaggacactgtccaagatgcgcagaccccgagggccagagggaccggctctgcaggaatcccacctcctgggcccactccgcacagagtgttctgcagggcctgggagaaccaggcacctggccaggacagcctgtgggtgggcagccgtgtgcacagatacacacacacgtcagggacagacacacacacaccagggacacacaccacacacaccagggacgcacaccacacacaccagggacacccacacacaccacggacgcacaccacacacaccagggacacccacacacaccagggacgcacaccacacacaccagggacccctgcacacaccagggacacacacacacacaccggggatgcacaccacacacacaccagggatgcataccacacacaccagggacccacacacacaccagggacccacacacactccagggacgcacaccacacacaccagggacccccgcaaacacacacaccagggacacacacacaccagggacacacacaccacacacacaccagggacacacaccacacacaccagggacacacaccagggacagacacacaagggatgcacacacaccagggacgcacagcacacacaccagggacccatacacacaccagggatgcacacacatcagggacacacaaacaccagggacgcacaccacacacaccagggacacacaccacacacacacacaccatggacacacacaccactggtacacgttgtgaacacaccatggacacacagagaaacacacacaacatgggtacacacaatacacaccacaaagacataacctccccacacactcacatacataacacacataccagagacacatggttacacacagcacacactccctcatcagacacccacacaccatctcacacacaccacacacccatcagacacccacacatcatctcacacaccacacactcaccagacacccacacatcatctcacacacaccacacacccatcagacacccaacatcatctcacacacactacacactcaccagacacccacacatcatctcgcacacaccacacacccatcagacacccaacatcatctcacagcagtcatatgcacaattagaggtgatttcatacatacactcacacacctagcagcactctctgtcaaaatacaccctcgctgacatcacacccattcacacccacacacacattctcccatacactcacaagtaagcacactcacacccacgcacacatccaggatgaggttttctctttaatgaggagctgtgtttctgctgtcacccctgcccaggtcatgcacctgtccaggttctacgggacctgcctacctgggcacaggtgggcctgtgtggcctctctgcctggccccggctctcgggggtgccagggagtgcccagtcccgcttccctgatgggcctgtgtgtggtgagctcaggtgaggccggggggcagggcggagccggatgggcccatgctgggcatgattccagccaggggagggacacctgtgtcccagccgaggcccagagggcaggggcttgcccatggccactcagcaccacaaggctcacacagctcctgacaccccacctcactttttcctgaacacagcctgggatgggtgtctaaaatgggtatctaaaaattggccttggccaggtgcagtgggtcatgtctgtaatcccagcactttggaaggctgaggcaggcagatcacctgaggtcgggagtttgagaccagcctgaccaacatggagaagccccgtctactaaaaatacaaaattagccaggcgtggtggtgcatgcctgtaatcccagctactcgagaggctgaggcaggagaattgcttgaacccgggaggcggagtttgcagtgagctgagatcacgccattgccctccagcctgggcgacagagcgaaactccgtctcaaaaaaaaaaaaaattgccttaaaccccaggaaaggactatccggagttactttattccctgtgtcatgcccagcaaggaaaggacagaggagggtgggcccgtgccctctggagggaccctctctgaggtccgttctgggtggcgctctctcctctcctactgcgcggggcctcaggaacaaggctcgggctgtagctgctggggcccgggggtccgtgggtgggaacagtgggcactctcgctaacactcctggggccagcccatgaagagctccgagggagcctttcgaggcccacgcgcgttctgctgtgtgcctttcacgtcttaattcccggtgcccttagcaggctgcgttcggagggctgggctccctgcccggggcttcccttcctatacacacagggcccctgccctgggcccagcccccagcctccttctttcctggctcagacgatgtccccgacgtccctgagcctggcgtgacggggacacaaaggcctggcatcctggatccctccctccctccctctgccggcctatttctcagagctttcagtgcctgcgtcaccgtcaccgtagggacttaatgacgtttagcagctcccgggcgggtggcttctcgcgctctgcaggggtgacggtgccatttgattcaaggggggctcaggagggggacggaagtagcactgcaccagccacacatacgctggctattgggtcctagtcacacctgctctgccccctgcccccttccccctccccagtcccgcggggtttctcaacaagccaggggaccacactctggagactgagagccggtgcctttgtcccatggagccagtgttcagttgctccttgtcccctcccgggatcctcactatccacacggcttgttgctggataaacaacggctcctttctttggaggctcgggggaggggggcggggccacggtcactgaatggggctcccacctgccagaggcgctgggccctggacaggaagtgttctggcagctggtgtgagtggtgcaaactccacaaaagtgtgtagcccagtcctgtttcccacctgacgctctctacccggcagcctctctccccaccccaggcaccctccccttgttggcacagtttggggggcacagatacccaaactgtatctagttggggttatgggatgactgtgcagatggctcatggtcacttatgggtacctcacagctgtccagaacaggaatggcttccgggaaactgcccctgcacacctgcagggtcagaggtcgtgtccgggcagtttcaagtccgaggagttaggaagagacagggcttgggagcagagccgggggctcctctgtggaaggttcttccagacccactagctcatgtaaaaacaaaacaaagcacctcgcggaattcaattatcccaaaaatacacacgatactatcagtaagagacttttctatcaatacttaaaagtaaattttggccaacagtgtgtgtggtagagcagggaagtccgggaagcctccagaaggatggaaggagaaggagagaagagggggtgggcgtctcccggaagctggagccaggcagagggtggggagggggcttctcctagcctgtgttctcctcggcatccctggtggcttggggctggggagggacacccagctcctcccgaccgacgtctatggcttctggtgctccactctcctctcggacagcagcaaacatttaaggtccacagagcttgttttcttaaggccccttaacttcagccagtcatggcttctccagaggaggggctgctctgggacgctgggtgctcctggtccccctgccctctacgtgggtcccccaaggggccttgccaaggggctggcccagagctggggtgcaggggaacagagctgcctccacccccaaattcctggtgggatttcctgtggagtctctaaggacctctgaagtggaaagctgtggagagcgaggcgtctcttcctctggggaaaaaggccttcagcgagcagaggcaggtgcgagtggcccatgaacttctccagtgctgggcaaagtgctcaccacagggagacaaaccaaccaagcaccgaagccgcaatggaactgtctagaaattaatgtgagctggagcccataggaggtccctgggcagggtttctgcttatagggccccagggagtgccggcagcttctgcagtgtcctcgagtgaccacctgccttgccacacacctggtgtctttgccctcaagatgggaatgtgtggccttccatgcgagccgtgcacttctccctcgggccaggccatgggtccagggggcaagtctgtgtgtccgtgccagccgtgcacctctccctctggccaggccataggtccagggggcaggtccgtgcatctgtgccagccatgcacctctccctcgggccaggccatgggtctagggggcaggtccgggcgtctggttcctcctttctgaccccgcaggtgtccagggcagtgcccagtgtggcgcgtgtcaggaatggctgctcaagtggcttgggacagatcagattcagtggcttctagcttggcacccacaaaagcacacaaacaggcaaacgaacacacagtttgtctggccaagtgcaggcgggctggggaagcgattccagggccctgccgagcagtatcctggggccctgcattggctcaggaggcccgttcaggctgcctttggtggggcctctggggcacctccacccccagtccccagagaggaagtggggagcgcgggtcgctgtccttgggcgagcacagccctctgcccaggcacggctccttctttatggacacccattccccgtgcttcttagtccggctggggacatcatcgtcttggtgctttggctaacgcagaactaacacacccttggggcccggcagcacatccgtgaaccagaaatcagaagcccgctctcggcagctccggcccacacagcccacaccggaaacccccaaacacccacccaggcgggacagccctgaccacacactgctcggcatggcccagtgcaggagcatgggagggggcagcggggaccccatttacacaaaaccgaaacaccgcaggaggccacaccgtgagaagtcaggtggggtggccttggcggctggaaagggggtttcagctgctggtcatggtggggtgctgtgcactatggcactgcacctgcctgcaaagaccaggccgcctcagcttccctgaaagcttgaggaggggcaggtgtctgggccccaacccaaggcctgtggagttggagtgagtcctgggagggccgggaataggattccaccagtgtccgggcattcgtcacctgccacctggacaggccgtctgcagagacctcaggtgaggctcatcgaatggccccagttgacagaccgggagaccgaagcagggtggtgagggggctgagacatcctgctggccctggggtgtgaggtgacagctgcagggaggagtgcttgtctcccgggggaatggggcctgcaacaattgctaagggacaggcctgtacacaggcacacaccacacacatgcacatagcacacataggcacacacaggcacacacgtaggcacacacatgcatacacgtgcacacagcatgcacacacacacacacacggagacccgtggttttggtgcctctggcaggtcctggggggcctgtacttgcacagtgggaaagctgctgcttctgggagggttaacgagacccccaccgccttccagaaggccccggcgcctgcctcttctctgccacagggcaggcgatgtgccctccctcatcgcccctcaaggcaactaccagtaactccagacagttctgttcttttccagccctgtggagcaagggtgcttggggacaacacctctgccctgtcccctcctgactgcagcttctgggggtgcaccgtggtgttagaaggagacaactcggtcttgggtggcaaagcgctctctgtgcctgccgggtggggcccagggctccctggggtttcgtgaccagcaggagatgctccccaggcagcttaggagccctctgggcagaggtgccctgacctcccagccccagaaggcacaggctgtgtgttcactgaggggtggtttccagctggccctgctacagcctcgggggctccccagaagggctggcacttcctctgcgcccactcaccctcaccctagaatcagccggtgggaacctggggactgcttcctactgggctccagctttcctgctcccaccacccaggagctatgacaacaaccctcttgcccacacggtacctccaagtcctggcctgcccccctccctcccggccgagggaaagggtagcacttttaggagagacactcgcacattctcagcgtccttttggggcataattgtcaacggggcagagctcagccccattctctctggacgcaggtgtgacccatcctgcacaaaactgaggcaaagtccccctcccgtcacacacagggcagggccgggagagccgcaagttgctcctcagtccaggaagggccaaggggcttctagagaagggggctcgggacccccacccccgaggttggacagctttgaggggtcagcagggagggctgccaggaggctgatctgaagccccccagtgccgcacagatggggcaccgcctcagaggccaaagactcagcaccccctcagcccaccgcccacctgcccttgaagcctcctgtagggttcaggtgtggtcaagacagggactccccgctttcatccccagagacctctgcagcggggggacctcctccaggtcggagatgccctgtatgtccctgccccgactcccctcctggacaccctttcctccacgggaggcccgggccggtcctgggacactagccagggccactcaactccaggccttgccggactttctagaggacatctagctgacctccagaggatcaccgagcaggaaggtcccgtaccacaatctcactgtggcctcaggcggaacctgactgtcaggcaggccaaggtggctgcgtaaccgcaggtttctcctggactcctcctcacacagggccaacctcacccctcctccactgtccacaggtgccccagacaccaaaatattcatgaagccccctgagaaatcaaggcaatgagagcgtgggtttcactcctggcctgggagtcaccgtcagtggcgggttggggatctgggaccccgaatctgattctgcttggggtctgtctcagaggcagcagctccccgacgtgcagaccccaggcttcatgccactccaagcctgaaggtctttgcccaaaagcagcatgtcaggaccttcctgcaggacctccctatttaaaccaccatgcccagggctcccgctttattttccctgtagctccatcgctactgaacaggcttggcttcctcacctgtgtctctagcgcccacctcccttccatcaagggcttttcccccgagggccgtgcatggaaggtgctcagcaaagagttgaaggatcatcaagtacgaggctggtgccagcgggtctttggttaggagaattgtcatcactgcctgcactgcagccagcagcttgcccaggtgtgcctgggacccaggtgtgcatgtgtgcctggaacccaggtgtgcatgtgtgcatgggacgcaggtgtgcctgggacccaggtgtgcatgggacttaggtgcacctgggacccaggtgtccataggatccaggtgtgtatgtgtgcatggaacccaggtgtgcatgggacccaggtgtgcatgtgtgcttgggacccaggtgtgcatgtgtgcatggaacccaggtatgcatgggacccaggtgtgcatgggacccagttgtgcatgggacttaggtgtgcatggaacccaggtatgcatgggacccaggtatgcatgggacttaggtgtgcatggaacccaggtgtgcatgggacccaggtgtgcatgtgtgcatgggacccaggtgtgcaggggacttaggtgtgcatggaaccccggtgtgcatgggacccaggtgtgcatgggactcagatgtgcatgggacttaggtgtgcatggaacccaggtatgcatgggactcagttgtgcatgcccctccccaacaggtgcacaagggacccaagtgtgcatgggacccaaaactgctggtgactgggacggcccttggctcgtctgctggtttcactgaggagaggctgctgccagaatcctgcggccaggtctgggggtggctgtcaggccatcccctctggccccaaggttggtgggggtgacctgaaccctcgaccactgtgcactctgtcatgggagggcttgaaaaccttcagtgccagctctgtttgcagcaggcctgatggctgccatggctgtgtcctctggcagcggtgatcctaagaaagggccctctcagctgggcacggtggctcacgcctgtaatcccaacactttgggaggccgaggcaggcggatcacgaggtcaagagatagagaccatcctggccaacatggtgaaaccccatctctactaaaaatacaaaaattagctgggcatggtggcacgcgcctgtagacccagctacttgggaggttgaggcaggagaatctcttgaacccaggaggtggtggttgcagtgagccaagattgtaccactgcactccagcctgacgacagagtgagactgtctcaaaaaaaaaaaaaaaccacaaaaaaatgaaagggccctctcagctgttgggccggcctctgccaggccctgcacccatgactatctctgcccctacctggggctgctggagggagatggcctcctcctaatgcagggagtgtgtccctccttgtggaaaggaccacggcctgggggccatctggaagttgaggaagccttgaagggtggggggaggaaagctggtttccacccagcggagattccggaaacgggagggtggcgggtgacctttacatagtggagatgatgacttgaataacacccatcaccctgttgccactggcgggacttagaaggggccctgagcgttcattggctacctcagtctcttatgcacatggaaactgaggcaaggggtccatggacacccttcccgtgatcnnnnnnnnnnnnnnnnnnnnnnnnnnnnnnnnnnnnnnnnnnnnnnnnnnnnnnnnnnnnnnnnnnnnnnnnnnnnnnnnnnnnnnnnnnnnnnnnnnnnnnnnnnnnnnnnnnnnnnnnnnnnnnnnnnnnnnnnnnnnnnnnnnnnnnnnnnnnnnnnnnnnnnnnnnnnnnnnnnnnnnnnnnnnnnnnnnnnnnnnnnnnnnnnnnnnnnnnnnnnnnnnnnnnnnnnnnnnnnnnnnnnnnnnnnnnnnnnnnnnnnnnnnnnnnnnnnnnnnnnnnnnnnnnnnnnnnnnnnnnnnnnnnnnnnnnnnnnnnnnnnnnnnnnnnnnnnnnnnnnnnnnnnnnnnnnnnnnnnnnnnnnnnnnnnnnnnnnnnnnnnnnnnnnnnnnnnnnnnnnnnnnnnnnnnnnnnnnnnnnnnnnnnnnnnnnnnnnnnnnnnnnnnnnnnnnnnnnnnnnnnnnnnnnnnnnnnnnnnnnnnnnnnnnnnnnnnnnnnnnnnnnnnnnnnnnnnnnnnnnnnnnnnnnnnnnnnnnnnnnnnnnnnnnnnnnnnnnnnnnnnnnnnnnnnnnnnnnnnnnnnnnnnnnnnnnnnnnnnnnnnnnnnnnnnnnnnnnnnnnnnnnnnnnnnnnnnnnnnnnnnnnnnnnnnnnnnnnnnnnnnnnnnnnnnnnnnnnnnnnnnnnnnnnnnnnnnnnnnnnnnnnnnnnnnnnnnnnnnnnnnnnnnnnnnnnnnnnnnnnnnnnnnnnnnnnnnnnnnnnnnnnnnnnnnnnnnnnnnnnnnnnnnnnnnnnnnnnnnnnnnnnnnnnnnnnnnnnnnnnnnnnnnnnnnnnnnnnnnnnnnnnnnnnnnnnnnnnnnnnnnnnnnnnnnnnnnnnnnnnnnnnnnnnnnnnnnnnnnnnnnnnnnnnnnnnnnnnnnnnnnnnnnnnnnnnnnnnnnnnnnnnnnnnnnnnnnnnnnnnnnnnnnnnnnnnnnnnnnnnnnnnnnnnnnnnnnnnnnnnnnnnnnnnnnnnnnnnnnnnnnnnnnnnnnnnnnnnnnnnnnnnnnnnnnnnnnnnnnnnnnnnnnnnnnnnnnnnnnnnnnnnnnnnnnnnnnnnnnnnnnnnnnnnnnnnnnnnnnnnnnnnnnnnnnnnnnnnnnnnnnnnnnnnnnnnnnnnnnnnnnnnnnnnnnnnnnnnnnnnnnnnnnnnnnnnnnnnnnnnnnnnnnnnnnnnnnnnnnnnnnnnnnnnnnnnnnnnnnnnnnnnnnnnnnnnnnnnnnnnnnnnnnnnnnnnnnnnnnnnnnnnnnnnnnnnnnnnnnnnnnnnnnnnnnnnnnnnnnnnnnnnnnnnnnnnnnnnnnnnnnnnnnnnnnnnnnnnnnnnnnnnnnnnnnnnnnnnnnnnnnnnnnnnnnnnnnnnnnnnnnnnnnnnnnnnnnnnnnnnnnnnnnnnnnnnnnnnnnnnnnnnnnnnnnnnnnnnnnnnnnnnnnnnnnnnnnnnnnnnnnnnnnnnnnnnnnnnnnnnnnnnnnnnnnnnnnnnnnnnnnnnnnnnnnnnnnnnnnnnnnnnnnnnnnnnnnnnnnnnnnnnnnnnnnnnnnnnnnnnnnnnnnnnnnnnnnnnnnnnnnnnnnnnnnnnnnnnnnnnnnnnnnnnnnnnnnnnnnnnnnnnnnnnnnnnnnnnnnnnnnnnnnnnnnnnnnnnnnnnnnnnnnnnnnnnnnnnnnnnnnnnnnnnnnnnnnnnnnnnnnnnnnnnnnnnnnnnnnnnnnnnnnnnnnnnnnnnnnnnnnnnnnnnnnnnnnnnnnnnnnnnnnnnnnnnnnnnnnnnnnnnnnnnnnnnnnnnnnnnnnnnnnnnnnnnnnnnnnnnnnnnnnnnnnnnnnnnnnnnnnnnnnnnnnnnnnnnnnnnnnnnnnnnnnnnnnnnnnnnnnnnnnnnnnnnnnnnnnnnnnnnnnnnnnnnnnnnnnnnnnnnnnnnnnnnnnnnnnnnnnnnnnnnnnnnnnnnnnnnnnnnnnnnnnnnnnnnnnnnnnnnnnnnnnnnnnnnnnnnnnnnnnnnnnnnnnnnnnnnnnnnnnnnnnnnnnnnnnnnnnnnnnnnnnnnnnnnnnnnnnnnnnnnnnnnnnnnnnnnnnnnnnnnnnnnnnnnnnnnnnnnnnnnnnnnnnnnnnnnnnnnnnnnnnnnnnnnnnnnnnnnnnnnnnnnnnnnnnnnnnnnnnnnnnnnnnnnnnnnnnnnnnnnnnnnnnnnnnnnnnnnnnnnnnnnnnnnnnnnnnnnnnnnnnnnnnnnnnnnnnnnnnnnnnnnnnnnnnnnnnnnnnnnnnnnnnnnnnnnnnnnnnnnnnnnnnnnnnnnnnnnnnnnnnnnnnnnnnnnnnnnnnnnnnnnnnnnnnnnnnnnnnnnnnnnnnnnnnnnnnnnnnnnnnnnnnnnnnnnnnnnnnnnnnnnnnnnnnnnnnnnnnnnnnnnnnnnnnnnnnnnnnnnnnnnnnnnnnnnnnnnnnnnnnnnnnnnnnnnnnnnnnnnnnnnnnnnnnnnnnnnnnnnnnnnnnnnnnnnnnnnnnnnnnnnnnnnnnnnnnnnnnnnnnnnnnnnnnnnnnnnnnnnnnnnnnnnnnnnnnnnnnnnnnnnnnnnnnnnnnnnnnnnnnnnnnnnnnnnnnnnnnnnnnnnnnnnnnnnnnnnnnnnnnnnnnnnnnnnnnnnnnnnnnnnnnnnnnnnnnnnnnnnnnnnnnnnnnnnnnnnnnnnnnnnnnnnnnnnnnnnnnnnnnnnnnnnnnnnnnnnnnnnnnnnnnnnnnnnnnnnnnnnnnnnnnnnnnnnnnnnnnnnnnnnnnnnnnnnnnnnnnnnnnnnnnnnnnnnnnnnnnnnnnnnnnnnnnnnnnnnnnnnnnnnnnnnnnnnnnnnnnnnnnnnnnnnnnnnnnnnnnnnnnnnnnnnnnnnnnnnnnnnnnnnnnnnnnnnnnnnnnnnnnnnnnnnnnnnnnnnnnnnnnnnnnnnnnnnnnnnnnnnnnnnnnnnnnnnnnnnnnnnnnnnnnnnnnnnnnnnnnnnnnnnnnnnnnnnnnnnnnnnnnnnnnnnnnnnnnnnnnnnnnnnnnnnnnnnnnnnnnnnnnnnnnnnnnnnnnnnnnnnnnnnnnnnnnnnnnnnnnnnnnnnnnnnnnnnnnnnnnnnnnnnnnnnnnnnnnnnnnnnnnnnnnnnnnnnnnnnnnnnnnnnnnnnnnnnnnnnnnnnnnnnnnnnnnnnnnnnnnnnnnnnnnnnnnnnnnnnnnnnnnnnnnnnnnnnnnnnnnnnnnnnnnnnnnnnnnnnnnnnnnnnnnnnnnnnnnnnnnnnnnnnnnnnnnnnnnnnnnnnnnnnnnnnnnnnnnnnnnnnnnnnnnnnnnnnnnnnnnnnnnnnnnnnnnnnnnnnnnnnnnnnnnnnnnnnnnnnnnnnnnnnnnnnnnnnnnnnnnnnnnnnnnnnnnnnnnnnnnnnnnnnnnnnnnnnnnnnnnnnnnnnnnnnnnnnnnnnnnnnnnnnnnnnnnnnnnnnnnnnnnnnnnnnnnnnnnnnnnnnnnnnnnnnnnnnnnnnnnnnnnnnnnnnnnnnnnnnnnnnnnnnnnnnnnnnnnnnnnnnnnnnnnnnnnnnnnnnnnnnnnnnnnnnnnnnnnnnnnnnnnnnnnnnnnnnnnnnnnnnnnnnnnnnnnnnnnnnnnnnnnnnnnnnnnnnnnnnnnnnnnnnnnnnnnnnnnnnnnnnnnnnnnnnnnnnnnnnnnnnnnnnnnnnnnnnnnnnnnnnnnnnnnnnnnnnnnnnnnnnnnnnnnnnnnnnnnnnnnnnnnnnnnnnnnnnnnnnnnnnnnnnnnnnnnnnnnnnnnnnnnnnnnnnnnnnnnnnnnnnnnnnnnnnnnnnnnnnnnnnnnnnnnnnnnnnnnnnnnnnnnnnnnnnnnnnnnnnnnnnnnnnnnnnnnnnnnnnnnnnnnnnnnnnnnnnnnnnnnnnnnnnnnnnnnnnnnnnnnnnnnnnnnnnnnnnnnnnnnnnnnnnnnnnnnnnnnnnnnnnnnnnnnnnnnnnnnnnnnnnnnnnnnnnnnnnnnnnnnnnnnnnnnnnnnnnnnnnnnnnnnnnnnnnnnnnnnnnnnnnnnnnnnnnnnnnnnnnnnnnnnnnnnnnnnnnnnnnnnnnnnnnnnnnnnnnnnnnnnnnnnnnnnnnnnnnnnnnnnnnnnnnnnnnnnnnnnnnnnnnnnnnnnnnnnnnnnnnnnnnnnnnnnnnnnnnnnnnnnnnnnnnnnnnnnnnnnnnnnnnnnnnnnnnnnnnnnnnnnnnnnnnnnnnnnnnnnnnnnnnnnnnnnnnnnnnnnnnnnnnnnnnnnnnnnnnnnnnnnnnnnnnnnnnnnnnnnnnnnnnnnnnnnnnnnnnnnnnnnnnnnnnnnnnnnnnnnnnnnnnnnnnnnnnnnnnnnnnnnnnnnnnnnnnnnnnnnnnnnnnnnnnnnnnnnnnnnnnnnnnnnnnnnnnnnnnnnnnnnnnnnnnnnnnnnnnnnnnnnnnnnnnnnnnnnnnnnnnnnnnnnnnnnnnnnnnnnnnnnnnnnnnnnnnnnnnnnnnnnnnnnnnnnnnnnnnnnnnnnnnnnnnnnnnnnnnnnnnnnnnnnnnnnnnnnnnnnnnnnnnnnnnnnnnnnnnnnnnnnnnnnnnnnnnnnnnnnnnnnnnnnnnnnnnnnnnnnnnnnnnnnnnnnnnnnnnnnnnnnnnnnnnnnnnnnnnnnnnnnnnnnnnnnnnnnnnnnnnnnnnnnnnnnnnnnnnnnnnnnnnnnnnnnnnnnnnnnnnnnnnnnnnnnnnnnnnnnnnnnnnnnnnnnnnnnnnnnnnnnnnnnnnnnnnnnnnnnnnnnnnnnnnnnnnnnnnnnnnnnnnnnnnnnnnnnnnnnnnnnnnnnnnnnnnnnnnnnnnnnnnnnnnnnnnnnnnnnnnnnnnnnnnnnnnnnnnnnnnnnnnnnnnnnnnnnnnnnnnnnnnnnnnnnnnnnnnnnnnnnnnnnnnnnnnnnnnnnnnnnnnnnnnnnnnnnnnnnnnnnnnnnnnnnnnnnnnnnnnnnnnnnnnnnnnnnnnnnnnnnnnnnnnnnnnnnnnnnnnnnnnnnnnnnnnnnnnnnnnnnnnnnnnnnnnnnnnnnnnnnnnnnnnnnnnnnnnnnnnnnnnnnnnnnnnnnnnnnnnnnnnnnnnnnnnnnnnnnnnnnnnnnnnnnnnnnnnnnnnnnnnnnnnnnnnnnnnnnnnnnnnnnnnnnnnnnnnnnnnnnnnnnnnnnnnnnnnnnnnnnnnnnnnnnnnnnnnnnnnnnnnnnnnnnnnnnnnnnnnnnnnnnnnnnnnnnnnnnnnnnnnnnnnnnnnnnnnnnnnnnnnnnnnnnnnnnnnnnnnnnnnnnnnnnnnnnnnnnnnnnnnnnnnnnnnnnnnnnnnnnnnnnnnnnnnnnnnnnnnnnnnnnnnnnnnnnnnnnnnnnnnnnnnnnnnnnnnnnnnnnnnnnnnnnnnnnnnnnnnnnnnnnnnnnnnnnnnnnnnnnnnnnnnnnnnnnnnnnnnnnnnnnnnnnnnnnnnnnnnnnnnnnnnnnnnnnnnnnnnnnnnnnnnnnnnnnnnnnnnnnnnnnnnnnnnnnnnnnnnnnnnnnnnnnnnnnnnnnnnnnnnnnnnnnnnnnnnnnnnnnnnnnnnnnnnnnnnnnnnnnnnnnnnnnnnnnnnnnnnnnnnnnnnnnnnnnnnnnnnnnnnnnnnnnnnnnnnnnnnnnnnnnnnnnnnnnnnnnnnnnnnnnnnnnnnnnnnnnnnnnnnnnnnnnnnnnnnnnnnnnnnnnnnnnnnnnnnnnnnnnnnnnnnnnnnnnnnnnnnnnnnnnnnnnnnnnnnnnnnnnnnnnnnnnnnnnnnnnnnnnnnnnnnnnnnnnnnnnnnnnnnnnnnnnnnnnnnnnnnnnnnnnnnnnnnnnnnnnnnnnnnnnnnnnnnnnnnnnnnnnnnnnnnnnnnnnnnnnnnnnnnnnnnnnnnnnnnnnnnnnnnnnnnnnnnnnnnnnnnnnnnnnnnnnnnnnnnnnnnnnnnnnnnnnnnnnnnnnnnnnnnnnnnnnnnnnnnnnnnnnnnnnnnnnnnnnnnnnnnnnnnnnnnnnnnnnnnnnnnnnnnnnnnnnnnnnnnnnnnnnnnnnnnnnnnnnnnnnnnnnnnnnnnnnnnnnnnnnnnnnnnnnnnnnnnnnnnnnnnnnnnnnnnnnnnnnnnnnnnnnnnnnnnnnnnnnnnnnnnnnnnnnnnnnnnnnnnnnnnnnnnnnnnnnnnnnnnnnnnnnnnnnnnnnnnnnnnnnnnnnnnnnnnnnnnnnnnnnnnnnnnnnnnnnnnnnnnnnnnnnnnnnnnnnnnnnnnnnnnnnnnnnnnnnnnnnnnnnnnnnnnnnnnnnnnnnnnnnnnnnnnnnnnnnnnnnnnnnnnnnnnnnnnnnnnnnnnnnnnnnnnnnnnnnnnnnnnnnnnnnnnnnnnnnnnnnnnnnnnnnnnnnnnnnnnnnnnnnnnnnnnnnnnnnnnnnnnnnnnnnnnnnnnnnnnnnnnnnnnnnnnnnnnnnnnnnnnnnnnnnnnnnnnnnnnnnnnnnnnnnnnnnnnnnnnnnnnnnnnnnnnnnnnnnnnnnnnnnnnnnnnnnnnnnnnnnnnnnnnnnnnnnnnnnnnnnnnnnnnnnnnnnnnnnnnnnnnnnnnnnnnnnnnnnnnnnnnnnnnnnnnnnnnnnnnnnnnnnnnnnnnnnnnnnnnnnnnnnnnnnnnnnnnnnnnnnnnnnnnnnnnnnnnnnnnnnnnnnnnnnnnnnnnnnnnnnnnnnnnnnnnnnnnnnnnnnnnnnnnnnnnnnnnnnnnnnnnnnnnnnnnnnnnnnnnnnnnnnnnnnnnnnnnnnnnnnnnnnnnnnnnnnnnnnnnnnnnnnnnnnnnnnnnnnnnnnnnnnnnnnnnnnnnnnnnnnnnnnnnnnnnnnnnnnnnnnnnnnnnnnnnnnnnnnnnnnnnnnnnnnnnnnnnnnnnnnnnnnnnnnnnnnnnnnnnnnnnnnnnnnnnnnnnnnnnnnnnnnnnnnnnnnnnnnnnnnnnnnnnnnnnnnnnnnnnnnnnnnnnnnnnnnnnnnnnnnnnnnnnnnnnnnnnnnnnnnnnnnnnnnnnnnnnnnnnnnnnnnnnnnnnnnnnnnnnnnnnnnnnnnnnnnnnnnnnnnnnnnnnnnnnnnnnnnnnnnnnnnnnnnnnnnnnnnnnnnnnnnnnnnnnnnnnnnnnnnnnnnnnnnnnnnnnnnnnnnnnnnnnnnnnnnnnnnnnnnnnnnnnnnnnnnnnnnnnnnnnnnnnnnnnnnnnnnnnnnnnnnnnnnnnnnnnnnnnnnnnnnnnnnnnnnnnnnnnnnnnnnnnnnnnnnnnnnnnnnnnnnnnnnnnnnnnnnnnnnnnnnnnnnnnnnnnnnnnnnnnnnnnnnnnnnnnnnnnnnnnnnnnnnnnnnnnnnnnnnnnnnnnnnnnnnnnnnnnnnnnnnnnnnnnnnnnnnnnnnnnnnnnnnnnnnnnnnnnnnnnnnnnnnnnnnnnnnnnnnnnnnnnnnnnnnnnnnnnnnnnnnnnnnnnnnnnnnnnnnnnnnnnnnnnnnnnnnnnnnnnnnnnnnnnnnnnnnnnnnnnnnnnnnnnnnnnnnnnnnnnnnnnnnnnnnnnnnnnnnnnnnnnnnnnnnnnnnnnnnnnnnnnnnnnnnnnnnnnnnnnnnnnnnnnnnnnnnnnnnnnnnnnnnnnnnnnnnnnnnnnnnnnnnnnnnnnnnnnnnnnnnnnnnnnnnnnnnnnnnnnnnnnnnnnnnnnnnnnnnnnnnnnnnnnnnnnnnnnnnnnnnnnnnnnnnnnnnnnnnnnnnnnnnnnnnnnnnnnnnnnnnnnnnnnnnnnnnnnnnnnnnnnnnnnnnnnnnnnnnnnnnnnnnnnnnnnnnnnnnnnnnnnnnnnnnnnnnnnnnnnnnnnnnnnnnnnnnnnnnnnnnnnnnnnnnnnnnnnnnnnnnnnnnnnnnnnnnnnnnnnnnnnnnnnnnnnnnnnnnnnnnnnnnnnnnnnnnnnnnnnnnnnnnnnnnnnnnnnnnnnnnnnnnnnnnnnnnnnnnnnnnnnnnnnnnnnnnnnnnnnnnnnnnnnnnnnnnnnnnnnnnnnnnnnnnnnnnnnnnnnnnnnnnnnnnnnnnnnnnnnnnnnnnnnnnnnnnnnnnnnnnnnnnnnnnnnnnnnnnnnnnnnnnnnnnnnnnnnnnnnnnnnnnnnnnnnnnnnnnnnnnnnnnnnnnnnnnnnnnnnnnnnnnnnnnnnnnnnnnnnnnnnnnnnnnnnnnnnnnnnnnnnnnnnnnnnnnnnnnnnnnnnnnnnnnnnnnnnnnnnnnnnnnnnnnnnnnnnnnnnnnnnnnnnnnnnnnnnnnnnnnnnnnnnnnnnnnnnnnnnnnnnnnnnnnnnnnnnnnnnnnnnnnnnnnnnnnnnnnnnnnnnnnnnnnnnnnnnnnnnnnnnnnnnnnnnnnnnnnnnnnnnnnnnnnnnnnnnnnnnnnnnnnnnnnnnnnnnnnnnnnnnnnnnnnnnnnnnnnnnnnnnnnnnnnnnnnnnnnnnnnnnnnnnnnnnnnnnnnnnnnnnnnnnnnnnnnnnnnnnnnnnnnnnnnnnnnnnnnnnnnnnnnnnnnnnnnnnnnnnnnnnnnnnnnnnnnnnnnnnnnnnnnnnnnnnnnnnnnnnnnnnnnnnnnnnnnnnnnnnnnnnnnnnnnnnnnnnnnnnnnnnnnnnnnnnnnnnnnnnnnnnnnnnnnnnnnnnnnnnnnnnnnnnnnnnnnnnnnnnnnnnnnnnnnnnnnnnnnnnnnnnnnnnnnnnnnnnnnnnnnnnnnnnnnnnnnnnnnnnnnnnnnnnnnnnnnnnnnnnnnnnnnnnnnnnnnnnnnnnnnnnnnnnnnnnnnnnnnnnnnnnnnnnnnnnnnnnnnnnnnnnnnnnnnnnnnnnnnnnnnnnnnnnnnnnnnnnnnnnnnnnnnnnnnnnnnnnnnnnnnnnnnnnnnnnnnnnnnnnnnnnnnnnnnnnnnnnnnnnnnnnnnnnnnnnnnnnnnnnnnnnnnnnnnnnnnnnnnnnnnnnnnnnnnnnnnnnnnnnnnnnnnnnnnnnnnnnnnnnnnnnnnnnnnnnnnnnnnnnnnnnnnnnnnnnnnnnnnnnnnnnnnnnnnnnnnnnnnnnnnnnnnnnnnnnnnnnnnnnnnnnnnnnnnnnnnnnnnnnnnnnnnnnnnnnnnnnnnnnnnnnnnnnnnnnnnnnnnnnnnnnnnnnnnnnnnnnnnnnnnnnnnnnnnnnnnnnnnnnnnnnnnnnnnnnnnnnnnnnnnnnnnnnnnnnnnnnnnnnnnnnnnnnnnnnnnnnnnnnnnnnnnnnnnnnnnnnnnnnnnnnnnnnnnnnnnnnnnnnnnnnnnnnnnnnnnnnnnnnnnnnnnnnnnnnnnnnnnnnnnnnnnnnnnnnnnnnnnnnnnnnnnnnnnnnnnnnnnnnnnnnnnnnnnnnnnnnnnnnnnnnnnnnnnnnnnnnnnnnnnnnnnnnnnnnnnnnnnnnnnnnnnnnnnnnnnnnnnnnnnnnnnnnnnnnnnnnnnnnnnnnnnnnnnnnnnnnnnnnnnnnnnnnnnnnnnnnnnnnnnnnnnnnnnnnnnnnnnnnnnnnnnnnnnnnnnnnnnnnnnnnnnnnnnnnnnnnnnnnnnnnnnnnnnnnnnnnnnnnnnnnnnnnnnnnnnnnnnnnnnnnnnnnnnnnnnnnnnnnnnnnnnnnnnnnnnnnnnnnnnnnnnnnnnnnnnnnnnnnnnnnnnnnnnnnnnnnnnnnnnnnnnnnnnnnnnnnnnnnnnnnnnnnnnnnnnnnnnnnnnnnnnnnnnnnnnnnnnnnnnnnnnnnnnnnnnnnnnnnnnnnnnnnnnnnnnnnnnnnnnnnnnnnnnnnnnnnnnnnnnnnnnnnnnnnnnnnnnnnnnnnnnnnnnnnnnnnnnnnnnnnnnnnnnnnnnnnnnnnnnnnnnnnnnnnnnnnnnnnnnnnnnnnnnnnnnnnnnnnnnnnnnnnnnnnnnnnnnnnnnnnnnnnnnnnnnnnnnnnnnnnnnnnnnnnnnnnnnnnnnnnnnnnnnnnnnnnnnnnnnnnnnnnnnnnnnnnnnnnnnnnnnnnnnnnnnnnnnnnnnnnnnnnnnnnnnnnnnnnnnnnnnnnnnnnnnnnnnnnnnnnnnnnnnnnnnnnnnnnnnnnnnnnnnnnnnnnnnnnnnnnnnnnnnnnnnnnnnnnnnnnnnnnnnnnnnnnnnnnnnnnnnnnnnnnnnnnnnnnnnnnnnnnnnnnnnnnnnnnnnnnnnnnnnnnnnnnnnnnnnnnnnnnnnnnnnnnnnnnnnnnnnnnnnnnnnnnnnnnnnnnnnnnnnnnnnnnnnnnnnnnnnnnnnnnnnnnnnnnnnnnnnnnnnnnnnnnnnnnnnnnnnnnnnnnnnnnnnnnnnnnnnnnnnnnnnnnnnnnnnnnnnnnnnnnnnnnnnnnnnnnnnnnnnnnnnnnnnnnnnnnnnnnnnnnnnnnnnnnnnnnnnnnnnnnnnnnnnnnnnnnnnnnnnnnnnnnnnnnnnnnnnnnnnnnnnnnnnnnnnnnnnnnnnnnnnnnnnnnnnnnnnnnnnnnnnnnnnnnnnnnnnnnnnnnnnnnnnnnnnnnnnnnnnnnnnnnnnnnnnnnnnnnnnnnnnnnnnnnnnnnnnnnnnnnnnnnnnnnnnnnnnnnnnnnnnnnnnnnnnnnnnnnnnnnnnnnnnnnnnnnnnnnnnnnnnnnnnnnnnnnnnnnnnnnnnnnnnnnnnnnnnnnnnnnnnnnnnnnnnnnnnnnnnnnnnnnnnnnnnnnnnnnnnnnnnnnnnnnnnnnnnnnnnnnnnnnnnnnnnnnnnnnnnnnnnnnnnnnnnnnnnnnnnnnnnnnnnnnnnnnnnnnnnnnnnnnnnnnnnnnnnnnnnnnnnnnnnnnnnnnnnnnnnnnnnnnnnnnnnnnnnnnnnnnnnnnnnnnnnnnnnnnnnnnnnnnnnnnnnnnnnnnnnnnnnnnnnnnnnnnnnnnnnnnnnnnnnnnnnnnnnnnnnnnnnnnnnnnnnnnnnnnnnnnnnnnnnnnnnnnnnnnnnnnnnnnnnnnnnnnnnnnnnnnnnnnnnnnnnnnnnnnnnnnnnnnnnnnnnnnnnnnnnnnnnnnnnnnnnnnnnnnnnnnnnnnnnnnnnnnnnnnnnnnnnnnnnnnnnnnnnnnnnnnnnnnnnnnnnnnnnnnnnnnnnnnnnnnnnnnnnnnnnnnnnnnnnnnnnnnnnnnnnnnnnnnnnnnnnnnnnnnnnnnnnnnnnnnnnnnnnnnnnnnnnnnnnnnnnnnnnnnnnnnnnnnnnnnnnnnnnnnnnnnnnnnnnnnnnnnnnnnnnnnnnnnnnnnnnnnnnnnnnnnnnnnnnnnnnnnnnnnnnnnnnnnnnnnnnnnnnnnnnnnnnnnnnnnnnnnnnnnnnnnnnnnnnnnnnnnnnnnnnnnnnnnnnnnnnnnnnnnnnnnnnnnnnnnnnnnnnnnnnnnnnnnnnnnnnnnnnnnnnnnnnnnnnnnnnnnnnnnnnnnnnnnnnnnnnnnnnnnnnnnnnnnnnnnnnnnnnnnnnnnnnnnnnnnnnnnnnnnnnnnnnnnnnnnnnnnnnnnnnnnnnnnnnnnnnnnnnnnnnnnnnnnnnnnnnnnnnnnnnnnnnnnnnnnnnnnnnnnnnnnnnnnnnnnnnnnnnnnnnnnnnnnnnnnnnnnnnnnnnnnnnnnnnnnnnnnnnnnnnnnnnnnnnnnnnnnnnnnnnnnnnnnnnnnnnnnnnnnnnnnnnnnnnnnnnnnnnnnnnnnnnnnnnnnnnnnnnnnnnnnnnnnnnnnnnnnnnnnnnnnnnnnnnnnnnnnnnnnnnnnnnnnnnnnnnnnnnnnnnnnnnnnnnnnnnnnnnnnnnnnnnnnnnnnnnnnnnnnnnnnnnnnnnnnnnnnnnnnnnnnnnnnnnnnnnnnnnnnnnnnnnnnnnnnnnnnnnnnnnnnnnnnnnnnnnnnnnnnnnnnnnnnnnnnnnnnnnnnnnnnnnnnnnnnnnnnnnnnnnnnnnnnnnnnnnnnnnnnnnnnnnnnnnnnnnnnnnnnnnnnnnnnnnnnnnnnnnnnnnnnnnnnnnnnnnnnnnnnnnnnnnnnnnnnnnnnnnnnnnnnnnnnnnnnnnnnnnnnnnnnnnnnnnnnnnnnnnnnnnnnnnnnnnnnnnnnnnnnnnnnnnnnnnnnnnnnnnnnnnnnnnnnnnnnnnnnnnnnnnnnnnnnnnnnnnnnnnnnnnnnnnnnnnnnnnnnnnnnnnnnnnnnnnnnnnnnnnnnnnnnnnnnnnnnnnnnnnnnnnnnnnnnnnnnnnnnnnnnnnnnnnnnnnnnnnnnnnnnnnnnnnnnnnnnnnnnnnnnnnnnnnnnnnnnnnnnnnnnnnnnnnnnnnnnnnnnnnnnnnnnnnnnnnnnnnnnnnnnnnnnnnnnnnnnnnnnnnnnnnnnnnnnnnnnnnnnnnnnnnnnnnnnnnnnnnnnnnnnnnnnnnnnnnnnnnnnnnnnnnnnnnnnnnnnnnnnnnnnnnnnnnnnnnnnnnnnnnnnnnnnnnnnnnnnnnnnnnnnnnnnnnnnnnnnnnnnnnnnnnnnnnnnnnnnnnnnnnnnnnnnnnnnnnnnnnnnnnnnnnnnnnnnnnnnnnnnnnnnnnnnnnnnnnnnnnnnnnnnnnnnnnnnnnnnnnnnnnnnnnnnnnnnnnnnnnnnnnnnnnnnnnnnnnnnnnnnnnnnnnnnnnnnnnnnnnnnnnnnnnnnnnnnnnnnnnnnnnnnnnnnnnnnnnnnnnnnnnnnnnnnnnnnnnnnnnnnnnnnnnnnnnnnnnnnnnnnnnnnnnnnnnnnnnnnnnnnnnnnnnnnnnnnnnnnnnnnnnnnnnnnnnnnnnnnnnnnnnnnnnnnnnnnnnnnnnnnnnnnnnnnnnnnnnnnnnnnnnnnnnnnnnnnnnnnnnnnnnnnnnnnnnnnnnnnnnnnnnnnnnnnnnnnnnnnnnnnnnnnnnnnnnnnnnnnnnnnnnnnnnnnnnnnnnnnnnnnnnnnnnnnnnnnnnnnnnnnnnnnnnnnnnnnnnnnnnnnnnnnnnnnnnnnnnnnnnnnnnnnnnnnnnnnnnnnnnnnnnnnnnnnnnnnnnnnnnnnnnnnnnnnnnnnnnnnnnnnnnnnnnnnnnnnnnnnnnnnnnnnnnnnnnnnnnnnnnnnnnnnnnnnnnnnnnnnnnnnnnnnnnnnnnnnnnnnnnnnnnnnnnnnnnnnnnnnnnnnnnnnnnnnnnnnnnnnnnnnnnnnnnnnnnnnnnnnnnnnnnnnnnnnnnnnnnnnnnnnnnnnnnnnnnnnnnnnnnnnnnnnnnnnnnnnnnnnnnnnnnnnnnnnnnnnnnnnnnnnnnnnnnnnnnnnnnnnnnnnnnnnnnnnnnnnnnnnnnnnnnnnnnnnnnnnnnnnnnnnnnnnnnnnnnnnnnnnnnnnnnnnnnnnnnnnnnnnnnnnnnnnnnnnnnnnnnnnnnnnnnnnnnnnnnnnnnnnnnnnnnnnnnnnnnnnnnnnnnnnnnnnnnnnnnnnnnnnnnnnnnnnnnnnnnnnnnnnnnnnnnnnnnnnnnnnnnnnnnnnnnnnnnnnnnnnnnnnnnnnnnnnnnnnnnnnnnnnnnnnnnnnnnnnnnnnnnnnnnnnnnnnnnnnnnnnnnnnnnnnnnnnnnnnnnnnnnnnnnnnnnnnnnnnnnnnnnnnnnnnnnnnnnnnnnnnnnnnnnnnnnnnnnnnnnnnnnnnnnnnnnnnnnnnnnnnnnnnnnnnnnnnnnnnnnnnnnnnnnnnnnnnnnnnnnnnnnnnnnnnnnnnnnnnnnnnnnnnnnnnnnnnnnnnnnnnnnnnnnnnnnnnnnnnnnnnnnnnnnnnnnnnnnnnnnnnnnnnnnnnnnnnnnnnnnnnnnnnnnnnnnnnnnnnnnnnnnnnnnnnnnnnnnnnnnnnnnnnnnnnnnnnnnnnnnnnnnnnnnnnnnnnnnnnnnnnnnnnnnnnnnnnnnnnnnnnnnnnnnnnnnnnnnnnnnnnnnnnnnnnnnnnnnnnnnnnnnnnnnnnnnnnnnnnnnnnnnnnnnnnnnnnnnnnnnnnnnnnnnnnnnnnnnnnnnnnnnnnnnnnnnnnnnnnnnnnnnnnnnnnnnnnnnnnnnnnnnnnnnnnnnnnnnnnnnnnnnnnnnnnnnnnnnnnnnnnnnnnnnnnnnnnnnnnnnnnnnnnnnnnnnnnnnnnnnnnnnnnnnnnnnnnnnnnnnnnnnnnnnnnnnnnnnnnnnnnnnnnnnnnnnnnnnnnnnnnnnnnnnnnnnnnnnnnnnnnnnnnnnnnnnnnnnnnnnnnnnnnnnnnnnnnnnnnnnnnnnnnnnnnnnnnnnnnnnnnnnnnnnnnnnnnnnnnnnnnnnnnnnnnnnnnnnnnnnnnnnnnnnnnnnnnnnnnnnnnnnnnnnnnnnnnnnnnnnnnnnnnnnnnnnnnnnnnnnnnnnnnnnnnnnnnnnnnnnnnnnnnnnnnnnnnnnnnnnnnnnnnnnnnnnnnnnnnnnnnnnnnnnnnnnnnnnnnnnnnnnnnnnnnnnnnnnnnnnnnnnnnnnnnnnnnnnnnnnnnnnnnnnnnnnnnnnnnnnnnnnnnnnnnnnnnnnnnnnnnnnnnnnnnnnnnnnnnnnnnnnnnnnnnnnnnnnnnnnnnnnnnnnnnnnnnnnnnnnnnnnnnnnnnnnnnnnnnnnnnnnnnnnnnnnnnnnnnnnnnnnnnnnnnnnnnnnnnnnnnnnnnnnnnnnnnnnnnnnnnnnnnnnnnnnnnnnnnnnnnnnnnnnnnnnnnnnnnnnnnnnnnnnnnnnnnnnnnnnnnnnnnnnnnnnnnnnnnnnnnnnnnnnnnnnnnnnnnnnnnnnnnnnnnnnnnnnnnnnnnnnnnnnnnnnnnnnnnnnnnnnnnnnnnnnnnnnnnnnnnnnnnnnnnnnnnnnnnnnnnnnnnnnnnnnnnnnnnnnnnnnnnnnnnnnnnnnnnnnnnnnnnnnnnnnnnnnnnnnnnnnnnnnnnnnnnnnnnnnnnnnnnnnnnnnnnnnnnnnnnnnnnnnnnnnnnnnnnnnnnnnnnnnnnnnnnnnnnnnnnnnnnnnnnnnnnnnnnnnnnnnnnnnnnnnnnnnnnnnnnnnnnnnnnnnnnnnnnnnnnnnnnnnnnnnnnnnnnnnnnnnnnnnnnnnnnnnnnnnnnnnnnnnnnnnnnnnnnnnnnnnnnnnnnnnnnnnnnnnnnnnnnnnnnnnnnnnnnnnnnnnnnnnnnnnnnnnnnnnnnnnnnnnnnnnnnnnnnnnnnnnnnnnnnnnnnnnnnnnnnnnnnnnnnnnnnnnnnnnnnnnnnnnnnnnnnnnnnnnnnnnnnnnnnnnnnnnnnnnnnnnnnnnnnnnnnnnnnnnnnnnnnnnnnnnnnnnnnnnnnnnnnnnnnnnnnnnnnnnnnnnnnnnnnnnnnnnnnnnnnnnnnnnnnnnnnnnnnnnnnnnnnnnnnnnnnnnnnnnnnnnnnnnnnnnnnnnnnnnnnnnnnnnnnnnnnnnnnnnnnnnnnnnnnnnnnnnnnnnnnnnnnnnnnnnnnnnnnnnnnnnnnnnnnnnnnnnnnnnnnnnnnnnnnnnnnnnnnnnnnnnnnnnnnnnnnnnnnnnnnnnnnnnnnnnnnnnnnnnnnnnnnnnnnnnnnnnnnnnnnnnnnnnnnnnnnnnnnnnnnnnnnnnnnnnnnnnnnnnnnnnnnnnnnnnnnnnnnnnnnnnnnnnnnnnnnnnnnnnnnnnnnnnnnnnnnnnnnnnnnnnnnnnnnnnnnnnnnnnnnnnnnnnnnnnnnnnnnnnnnnnnnnnnnnnnnnnnnnnnnnnnnnnnnnnnnnnnnnnnnnnnnnnnnnnnnnnnnnnnnnnnnnnnnnnnnnnnnnnnnnnnnnnnnnnnnnnnnnnnnnnnnnnnnnnnnnnnnnnnnnnnnnnnnnnnnnnnnnnnnnnnnnnnnnnnnnnnnnnnnnnnnnnnnnnnnnnnnnnnnnnnnnnnnnnnnnnnnnnnnnnnnnnnnnnnnnnnnnnnnnnnnnnnnnnnnnnnnnnnnnnnnnnnnnnnnnnnnnnnnnnnnnnnnnnnnnnnnnnnnnnnnnnnnnnnnnnnnnnnnnnnnnnnnnnnnnnnnnnnnnnnnnnnnnnnnnnnnnnnnnnnnnnnnnnnnnnnnnnnnnnnnnnnnnnnnnnnnnnnnnnnnnnnnnnnnnnnnnnnnnnnnnnnnnnnnnnnnnnnnnnnnnnnnnnnnnnnnnnnnnnnnnnnnnnnnnnnnnnnnnnnnnnnnnnnnnnnnnnnnnnnnnnnnnnnnnnnnnnnnnnnnnnnnnnnnnnnnnnnnnnnnnnnnnnnnnnnnnnnnnnnnnnnnnnnnnnnnnnnnnnnnnnnnnnnnnnnnnnnnnnnnnnnnnnnnnnnnnnnnnnnnnnnnnnnnnnnnnnnnnnnnnnnnnnnnnnnnnnnnnnnnnnnnnnnnnnnnnnnnnnnnnnnnnnnnnnnnnnnnnnnnnnnnnnnnnnnnnnnnnnnnnnnnnnnnnnnnnnnnnnnnnnnnnnnnnnnnnnnnnnnnnnnnnnnnnnnnnnnnnnnnnnnnnnnnnnnnnnnnnnnnnnnnnnnnnnnnnnnnnnnnnnnnnnnnnnnnnnnnnnnnnnnnnnnnnnnnnnnnnnnnnnnnnnnnnnnnnnnnnnnnnnnnnnnnnnnnnnnnnnnnnnnnnnnnnnnnnnnnnnnnnnnnnnnnnnnnnnnnnnnnnnnnnnnnnnnnnnnnnnnnnnnnnnnnnnnnnnnnnnnnnnnnnnnnnnnnnnnnnnnnnnnnnnnnnnnnnnnnnnnnnnnnnnnnnnnnnnnnnnnnnnnnnnnnnnnnnnnnnnnnnnnnnnnnnnnnnnnnnnnnnnnnnnnnnnnnnnnnnnnnnnnnnnnnnnnnnnnnnnnnnnnnnnnnnnnnnnnnnnnnnnnnnnnnnnnnnnnnnnnnnnnnnnnnnnnnnnnnnnnnnnnnnnnnnnnnnnnnnnnnnnnnnnnnnnnnnnnnnnnnnnnnnnnnnnnnnnnnnnnnnnnnnnnnnnnnnnnnnnnnnnnnnnnnnnnnnnnnnnnnnnnnnnnnnnnnnnnnnnnnnnnnnnnnnnnnnnnnnnnnnnnnnnnnnnnnnnnnnnnnnnnnnnnnnnnnnnnnnnnnnnnnnnnnnnnnnnnnnnnnnnnnnnnnnnnnnnnnnnnnnnnnnnnnnnnnnnnnnnnnnnnnnnnnnnnnnnnnnnnnnnnnnnnnnnnnnnnnnnnnnnnnnnnnnnnnnnnnnnnnnnnnnnnnnnnnnnnnnnnnnnnnnnnnnnnnnnnnnnnnnnnnnnnnnnnnnnnnnnnnnnnnnnnnnnnnnnnnnnnnnnnnnnnnnnnnnnnnnnnnnnnnnnnnnnnnnnnnnnnnnnnnnnnnnnnnnnnnnnnnnnnnnnnnnnnnnnnnnnnnnnnnnnnnnnnnnnnnnnnnnnnnnnnnnnnnnnnnnnnnnnnnnnnnnnnnnnnnnnnnnnnnnnnnnnnnnnnnnnnnnnnnnnnnnnnnnnnnnnnnnnnnnnnnnnnnnnnnnnnnnnnnnnnnnnnnnnnnnnnnnnnnnnnnnnnnnnnnnnnnnnnnnnnnnnnnnnnnnnnnnnnnnnnnnnnnnnnnnnnnnnnnnnnnnnnnnnnnnnnnnnnnnnnnnnnnnnnnnnnnnnnnnnnnnnnnnnnnnnnnnnnnnnnnnnnnnnnnnnnnnnnnnnnnnnnnnnnnnnnnnnnnnnnnnnnnnnnnnnnnnnnnnnnnnnnnnnnnnnnnnnnnnnnnnnnnnnnnnnnnnnnnnnnnnnnnnnnnnnnnnnnnnnnnnnnnnnnnnnnnnnnnnnnnnnnnnnnnnnnnnnnnnnnnnnnnnnnnnnnnnnnnnnnnnnnnnnnnnnnnnnnnnnnnnnnnnnnnnnnnnnnnnnnnnnnnnnnnnnnnnnnnnnnnnnnnnnnnnnnnnnnnnnnnnnnnnnnnnnnnnnnnnnnnnnnnnnnnnnnnnnnnnnnnnnnnnnnnnnnnnnnnnnnnnnnnnnnnnnnnnnnnnnnnnnnnnnnnnnnnnnnnnnnnnnnnnnnnnnnnnnnnnnnnnnnnnnnnnnnnnnnnnnnnnnnnnnnnnnnnnnnnnnnnnnnnnnnnnnnnnnnnnnnnnnnnnnnnnnnnnnnnnnnnnnnnnnnnnnnnnnnnnnnnnnnnnnnnnnnnnnnnnnnnnnnnnnnnnnnnnnnnnnnnnnnnnnnnnnnnnnnnnnnnnnnnnnnnnnnnnnnnnnnnnnnnnnnnnnnnnnnnnnnnnnnnnnnnnnnnnnnnnnnnnnnnnnnnnnnnnnnnnnnnnnnnnnnnnnnnnnnnnnnnnnnnnnnnnnnnnnnnnnnnnnnnnnnnnnnnnnnnnnnnnnnnnnnnnnnnnnnnnnnnnnnnnnnnnnnnnnnnnnnnnnnnnnnnnnnnnnnnnnnnnnnnnnnnnnnnnnnnnnnnnnnnnnnnnnnnnnnnnnnnnnnnnnnnnnnnnnnnnnnnnnnnnnnnnnnnnnnnnnnnnnnnnnnnnnnnnnnnnnnnnnnnnnnnnnnnnnnnnnnnnnnnnnnnnnnnnnnnnnnnnnnnnnnnnnnnnnnnnnnnnnnnnnnnnnnnnnnnnnnnnnnnnnnnnnnnnnnnnnnnnnnnnnnnnnnnnnnnnnnnnnnnnnnnnnnnnnnnnnnnnnnnnnnnnnnnnnnnnnnnnnnnnnnnnnnnnnnnnnnnnnnnnnnnnnnnnnnnnnnnnnnnnnnnnnnnnnnnnnnnnnnnnnnnnnnnnnnnnnnnnnnnnnnnnnnnnnnnnnnnnnnnnnnnnnnnnnnnnnnnnnnnnnnnnnnnnnnnnnnnnnnnnnnnnnnnnnnnnnnnnnnnnnnnnnnnnnnnnnnnnnnnnnnnnnnnnnnnnnnnnnnnnnnnnnnnnnnnnnnnnnnnnnnnnnnnnnnnnnnnnnnnnnnnnnnnnnnnnnnnnnnnnnnnnnnnnnnnnnnnnnnnnnnnnnnnnnnnnnnnnnnnnnnnnnnnnnnnnnnnnnnnnnnnnnnnnnnnnnnnnnnnnnnnnnnnnnnnnnnnnnnnnnnnnnnnnnnnnnnnnnnnnnnnnnnnnnnnnnnnnnnnnnnnnnnnnnnnnnnnnnnnnnnnnnnnnnnnnnnnnnnnnnnnnnnnnnnnnnnnnnnnnnnnnnnnnnnnnnnnnnnnnnnnnnnnnnnnnnnnnnnnnnnnnnnnnnnnnnnnnnnnnnnnnnnnnnnnnnnnnnnnnnnnnnnnnnnnnnnnnnnnnnnnnnnnnnnnnnnnnnnnnnnnnnnnnnnnnnnnnnnnnnnnnnnnnnnnnnnnnnnnnnnnnnnnnnnnnnnnnnnnnnnnnnnnnnnnnnnnnnnnnnnnnnnnnnnnnnnnnnnnnnnnnnnnnnnnnnnnnnnnnnnnnnnnnnnnnnnnnnnnnnnnnnnnnnnnnnnnnnnnnnnnnnnnnnnnnnnnnnnnnnnnnnnnnnnnnnnnnnnnnnnnnnnnnnnnnnnnnnnnnnnnnnnnnnnnnnnnnnnnnnnnnnnnnnnnnnnnnnnnnnnnnnnnnnnnnnnnnnnnnnnnnnnnnnnnnnnnnnnnnnnnnnnnnnnnnnnnnnnnnnnnnnnnnnnnnnnnnnnnnnnnnnnnnnnnnnnnnnnnnnnnnnnnnnnnnnnnnnnnnnnnnnnnnnnnnnnnnnnnnnnnnnnnnnnnnnnnnnnnnnnnnnnnnnnnnnnnnnnnnnnnnnnnnnnnnnnnnnnnnnnnnnnnnnnnnnnnnnnnnnnnnnnnnnnnnnnnnnnnnnnnnnnnnnnnnnnnnnnnnnnnnnnnnnnnnnnnnnnnnnnnnnnnnnnnnnnnnnnnnnnnnnnnnnnnnnnnnnnnnnnnnnnnnnnnnnnnnnnnnnnnnnnnnnnnnnnnnnnnnnnnnnnnnnnnnnnnnnnnnnnnnnnnnnnnnnnnnnnnnnnnnnnnnnnnnnnnnnnnnnnnnnnnnnnnnnnnnnnnnnnnnnnnnnnnnnnnnnnnnnnnnnnnnnnnnnnnnnnnnnnnnnnnnnnnnnnnnnnnnnnnnnnnnnnnnnnnnnnnnnnnnnnnnnnnnnnnnnnnnnnnnnnnnnnnnnnnnnnnnnnnnnnnnnnnnnnnnnnnnnnnnnnnnnnnnnnnnnnnnnnnnnnnnnnnnnnnnnnnnnnnnnnnnnnnnnnnnnnnnnnnnnnnnnnnnnnnnnnnnnnnnnnnnnnnnnnnnnnnnnnnnnnnnnnnnnnnnnnnnnnnnnnnnnnnnnnnnnnnnnnnnnnnnnnnnnnnnnnnnnnnnnnnnnnnnnnnnnnnnnnnnnnnnnnnnnnnnnnnnnnnnnnnnnnnnnnnnnnnnnnnnnnnnnnnnnnnnnnnnnnnnnnnnnnnnnnnnnnnnnnnnnnnnnnnnnnnnnnnnnnnnnnnnnnnnnnnnnnnnnnnnnnnnnnnnnnnnnnnnnnnnnnnnnnnnnnnnnnnnnnnnnnnnnnnnnnnnnnnnnnnnnnnnnnnnnnnnnnnnnnnnnnnnnnnnnnnnnnnnnnnnnnnnnnnnnnnnnnnnnnnnnnnnnnnnnnnnnnnnnnnnnnnnnnnnnnnnnnnnnnnnnnnnnnnnnnnnnnnnnnnnnnnnnnnnnnnnnnnnnnnnnnnnnnnnnnnnnnnnnnnnnnnnnnnnnnnnnnnnnnnnnnnnnnnnnnnnnnnnnnnnnnnnnnnnnnnnnnnnnnnnnnnnnnnnnnnnnnnnnnnnnnnnnnnnnnnnnnnnnnnnnnnnnnnnnnnnnnnnnnnnnnnnnnnnnnnnnnnnnnnnnnnnnnnnnnnnnnnnnnnnnnnnnnnnnnnnnnnnnnnnnnnnnnnnnnnnnnnnnnnnnnnnnnnnnnnnnnnnnnnnnnnnnnnnnnnnnnnnnnnnnnnnnnnnnnnnnnnnnnnnnnnnnnnnnnnnnnnnnnnnnnnnnnnnnnnnnnnnnnnnnnnnnnnnnnnnnnnnnnnnnnnnnnnnnnnnnnnnnnnnnnnnnnnnnnnnnnnnnnnnnnnnnnnnnnnnnnnnnnnnnnnnnnnnnnnnnnnnnnnnnnnnnnnnnnnnnnnnnnnnnnnnnnnnnnnnnnnnnnnnnnnnnnnnnnnnnnnnnnnnnnnnnnnnnnnnnnnnnnnnnnnnnnnnnnnnnnnnnnnnnnnnnnnnnnnnnnnnnnnnnnnnnnnnnnnnnnnnnnnnnnnnnnnnnnnnnnnnnnnnnnnnnnnnnnnnnnnnnnnnnnnnnnnnnnnnnnnnnnnnnnnnnnnnnnnnnnnnnnnnnnnnnnnnnnnnnnnnnnnnnnnnnnnnnnnnnnnnnnnnnnnnnnnnnnnnnnnnnnnnnnnnnnnnnnnnnnnnnnnnnnnnnnnnnnnnnnnnnnnnnnnnnnnnnnnnnnnnnnnnnnnnnnnnnnnnnnnnnnnnnnnnnnnnnnnnnnnnnnnnnnnnnnnnnnnnnnnnnnnnnnnnnnnnnnnnnnnnnnnnnnnnnnnnnnnnnnnnnnnnnnnnnnnnnnnnnnnnnnnnnnnnnnnnnnnnnnnnnnnnnnnnnnnnnnnnnnnnnnnnnnnnnnnnnnnnnnnnnnnnnnnnnnnnnnnnnnnnnnnnnnnnnnnnnnnnnnnnnnnnnnnnnnnnnnnnnnnnnnnnnnnnnnnnnnnnnnnnnnnnnnnnnnnnnnnnnnnnnnnnnnnnnnnnnnnnnnnnnnnnnnnnnnnnnnnnnnnnnnnnnnnnnnnnnnnnnnnnnnnnnnnnnnnnnnnnnnnnnnnnnnnnnnnnnnnnnnnnnnnnnnnnnnnnnnnnnnnnnnnnnnnnnnnnnnnnnnnnnnnnnnnnnnnnnnnnnnnnnnnnnnnnnnnnnnnnnnnnnnnnnnnnnnnnnnnnnnnnnnnnnnnnnnnnnnnnnnnnnnnnnnnnnnnnnnnnnnnnnnnnnnnnnnnnnnnnnnnnnnnnnnnnnnnnnnnnnnnnnnnnnnnnnnnnnnnnnnnnnnnnnnnnnnnnnnnnnnnnnnnnnnnnnnnnnnnnnnnnnnnnnnnnnnnnnnnnnnnnnnnnnnnnnnnnnnnnnnnnnnnnnnnnnnnnnnnnnnnnnnnnnnnnnnnnnnnnnnnnnnnnnnnnnnnnnnnnnnnnnnnnnnnnnnnnnnnnnnnnnnnnnnnnnnnnnnnnnnnnnnnnnnnnnnnnnnnnnnnnnnnnnnnnnnnnnnnnnnnnnnnnnnnnnnnnnnnnnnnnnnnnnnnnnnnnnnnnnnnnnnnnnnnnnnnnnnnnnnnnnnnnnnnnnnnnnnnnnnnnnnnnnnnnnnnnnnnnnnnnnnnnnnnnnnnnnnnnnnnnnnnnnnnnnnnnnnnnnnnnnnnnnnnnnnnnnnnnnnnnnnnnnnnnnnnnnnnnnnnnnnnnnnnnnnnnnnnnnnnnnnnnnnnnnnnnnnnnnnnnnnnnnnnnnnnnnnnnnnnnnnnnnnnnnnnnnnnnnnnnnnnnnnnnnnnnnnnnnnnnnnnnnnnnnnnnnnnnnnnnnnnnnnnnnnnnnnnnnnnnnnnnnnnnnnnnnnnnnnnnnnnnnnnnnnnnnnnnnnnnnnnnnnnnnnnnnnnnnnnnnnnnnnnnnnnnnnnnnnnnnnnnnnnnnnnnnnnnnnnnnnnnnnnnnnnnnnnnnnnnnnnnnnnnnnnnnnnnnnnnnnnnnnnnnnnnnnnnnnnnnnnnnnnnnnnnnnnnnnnnnnnnnnnnnnnnnnnnnnnnnnnnnnnnnnnnnnnnnnnnnnnnnnnnnnnnnnnnnnnnnnnnnnnnnnnnnnnnnnnnnnnnnnnnnnnnnnnnnnnnnnnnnnnnnnnnnnnnnnnnnnnnnnnnnnnnnnnnnnnnnnnnnnnnnnnnnnnnnnnnnnnnnnnnnnnnnnnnnnnnnnnnnnnnnnnnnnnnnnnnnnnnnnnnnnnnnnnnnnnnnnnnnnnnnnnnnnnnnnnnnnnnnnnnnnnnnnnnnnnnnnnnnnnnnnnnnnnnnnnnnnnnnnnnnnnnnnnnnnnnnnnnnnnnnnnnnnnnnnnnnnnnnnnnnnnnnnnnnnnnnnnnnnnnnnnnnnnnnnnnnnnnnnnnnnnnnnnnnnnnnnnnnnnnnnnnnnnnnnnnnnnnnnnnnnnnnnnnnnnnnnnnnnnnnnnnnnnnnnnnnnnnnnnnnnnnnnnnnnnnnnnnnnnnnnnnnnnnnnnnnnnnnnnnnnnnnnnnnnnnnnnnnnnnnnnnnnnnnnnnnnnnnnnnnnnnnnnnnnnnnnnnnnnnnnnnnnnnnnnnnnnnnnnnnnnnnnnnnnnnnnnnnnnnnnnnnnnnnnnnnnnnnnnnnnnnnnnnnnnnnnnnnnnnnnnnnnnnnnnnnnnnnnnnnnnnnnnnnnnnnnnnnnnnnnnnnnnnnnnnnnnnnnnnnnnnnnnnnnnnnnnnnnnnnnnnnnnnnnnnnnnnnnnnnnnnnnnnnnnnnnnnnnnnnnnnnnnnnnnnnnnnnnnnnnnnnnnnnnnnnnnnnnnnnnnnnnnnnnnnnnnnnnnnnnnnnnnnnnnnnnnnnnnnnnnnnnnnnnnnnnnnnnnnnnnnnnnnnnnnnnnnnnnnnnnnnnnnnnnnnnnnnnnnnnnnnnnnnnnnnnnnnnnnnnnnnnnnnnnnnnnnnnnnnnnnnnnnnnnnnnnnnnnnnnnnnnnnnnnnnnnnnnnnnnnnnnnnnnnnnnnnnnnnnnnnnnnnnnnnnnnnnnnnnnnnnnnnnnnnnnnnnnnnnnnnnnnnnnnnnnnnnnnnnnnnnnnnnnnnnnnnnnnnnnnnnnnnnnnnnnnnnnnnnnnnnnnnnnnnnnnnnnnnnnnnnnnnnnnnnnnnnnnnnnnnnnnnnnnnnnnnnnnnnnnnnnnnnnnnnnnnnnnnnnnnnnnnnnnnnnnnnnnnnnnnnnnnnnnnnnnnnnnnnnnnnnnnnnnnnnnnnnnnnnnnnnnnnnnnnnnnnnnnnnnnnnnnnnnnnnnnnnnnnnnnnnnnnnnnnnnnnnnnnnnnnnnnnnnnnnnnnnnnnnnnnnnnnnnnnnnnnnnnnnnnnnnnnnnnnnnnnnnnnnnnnnnnnnnnnnnnnnnnnnnnnnnnnnnnnnnnnnnnnnnnnnnnnnnnnnnnnnnnnnnnnnnnnnnnnnnnnnnnnnnnnnnnnnnnnnnnnnnnnnnnnnnnnnnnnnnnnnnnnnnnnnnnnnnnnnnnnnnnnnnnnnnnnnnnnnnnnnnnnnnnnnnnnnnnnnnnnnnnnnnnnnnnnnnnnnnnnnnnnnnnnnnnnnnnnnnnnnnnnnnnnnnnnnnnnnnnnnnnnnnnnnnnnnnnnnnnnnnnnnnnnnnnnnnnnnnnnnnnnnnnnnnnnnnnnnnnnnnnnnnnnnnnnnnnnnnnnnnnnnnnnnnnnnnnnnnnnnnnnnnnnnnnnnnnnnnnnnnnnnnnnnnnnnnnnnnnnnnnnnnnnnnnnnnnnnnnnnnnnnnnnnnnnnnnnnnnnnnnnnnnnnnnnnnnnnnnnnnnnnnnnnnnnnnnnnnnnnnnnnnnnnnnnnnnnnnnnnnnnnnnnnnnnnnnnnnnnnnnnnnnnnnnnnnnnnnnnnnnnnnnnnnnnnnnnnnnnnnnnnnnnnnnnnnnnnnnnnnnnnnnnnnnnnnnnnnnnnnnnnnnnnnnnnnnnnnnnnnnnnnnnnnnnnnnnnnnnnnnnnnnnnnnnnnnnnnnnnnnnnnnnnnnnnnnnnnnnnnnnnnnnnnnnnnnnnnnnnnnnnnnnnnnnnnnnnnnnnnnnnnnnnnnnnnnnnnnnnnnnnnnnnnnnnnnnnnnnnnnnnnnnnnnnnnnnnnnnnnnnnnnnnnnnnnnnnnnnnnnnnnnnnnnnnnnnnnnnnnnnnnnnnnnnnnnnnnnnnnnnnnnnnnnnnnnnnnnnnnnnnnnnnnnnnnnnnnnnnnnnnnnnnnnnnnnnnnnnnnnnnnnnnnnnnnnnnnnnnnnnnnnnnnnnnnnnnnnnnnnnnnnnnnnnnnnnnnnnnnnnnnnnnnnnnnnnnnnnnnnnnnnnnnnnnnnnnnnnnnnnnnnnnnnnnnnnnnnnnnnnnnnnnnnnnnnnnnnnnnnnnnnnnnnnnnnnnnnnnnnnnnnnnnnnnnnnnnnnnnnnnnnnnnnnnnnnnnnnnnnnnnnnnnnnnnnnnnnnnnnnnnnnnnnnnnnnnnnnnnnnnnnnnnnnnnnnnnnnnnnnnnnnnnnnnnnnnnnnnnnnnnnnnnnnnnnnnnnnnnnnnnnnnnnnnnnnnnnnnnnnnnnnnnnnnnnnnnnnnnnnnnnnnnnnnnnnnnnnnnnnnnnnnnnnnnnnnnnnnnnnnnnnnnnnnnnnnnnnnnnnnnnnnnnnnnnnnnnnnnnnnnnnnnnnnnnnnnnnnnnnnnnnnnnnnnnnnnnnnnnnnnnnnnnnnnnnnnnnnnnnnnnnnnnnnnnnnnnnnnnnnnnnnnnnnnnnnnnnnnnnnnnnnnnnnnnnnnnnnnnnnnnnnnnnnnnnnnnnnnnnnnnnnnnnnnnnnnnnnnnnnnnnnnnnnnnnnnnnnnnnnnnnnnnnnnnnnnnnnnnnnnnnnnnnnnnnnnnnnnnnnnnnnnnnnnnnnnnnnnnnnnnnnnnnnnnnnnnnnnnnnnnnnnnnnnnnnnnnnnnnnnnnnnnnnnnnnnnnnnnnnnnnnnnnnnnnnnnnnnnnnnnnnnnnnnnnnnnnnnnnnnnnnnnnnnnnnnnnnnnnnnnnnnnnnnnnnnnnnnnnnnnnnnnnnnnnnnnnnnnnnnnnnnnnnnnnnnnnnnnnnnnnnnnnnnnnnnnnnnnnnnnnnnnnnnnnnnnnnnnnnnnnnnnnnnnnnnnnnnnnnnnnnnnnnnnnnnnnnnnnnnnnnnnnnnnnnnnnnnnnnnnnnnnnnnnnnnnnnnnnnnnnnnnnnnnnnnnnnnnnnnnnnnnnnnnnnnnnnnnnnnnnnnnnnnnnnnnnnnnnnnnnnnnnnnnnnnnnnnnnnnnnnnnnnnnnnnnnnnnnnnnnnnnnnnnnnnnnnnnnnnnnnnnnnnnnnnnnnnnnnnnnnnnnnnnnnnnnnnnnnnnnnnnnnnnnnnnnnnnnnnnnnnnnnnnnnnnnnnnnnnnnnnnnnnnnnnnnnnnnnnnnnnnnnnnnnnnnnnnnnnnnnnnnnnnnnnnnnnnnnnnnnnnnnnnnnnnnnnnnnnnnnnnnnnnnnnnnnnnnnnnnnnnnnnnnnnnnnnnnnnnnnnnnnnnnnnnnnnnnnnnnnnnnnnnnnnnnnnnnnnnnnnnnnnnnnnnnnnnnnnnnnnnnnnnnnnnnnnnnnnnnnnnnnnnnnnnnnnnnnnnnnnnnnnnnnnnnnnnnnnnnnnnnnnnnnnnnnnnnnnnnnnnnnnnnnnnnnnnnnnnnnnnnnnnnnnnnnnnnnnnnnnnnnnnnnnnnnnnnnnnnnnnnnnnnnnnnnnnnnnnnnnnnnnnnnnnnnnnnnnnnnnnnnnnnnnnnnnnnnnnnnnnnnnnnnnnnnnnnnnnnnnnnnnnnnnnnnnnnnnnnnnnnnnnnnnnnnnnnnnnnnnnnnnnnnnnnnnnnnnnnnnnnnnnnnnnnnnnnnnnnnnnnnnnnnnnnnnnnnnnnnnnnnnnnnnnnnnnnnnnnnnnnnnnnnnnnnnnnnnnnnnnnnnnnnnnnnnnnnnnnnnnnnnnnnnnnnnnnnnnnnnnnnnnnnnnnnnnnnnnnnnnnnnnnnnnnnnnnnnnnnnnnnnnnnnnnnnnnnnnnnnnnnnnnnnnnnnnnnnnnnnnnnnnnnnnnnnnnnnnnnnnnnnnnnnnnnnnnnnnnnnnnnnnnnnnnnnnnnnnnnnnnnnnnnnnnnnnnnnnnnnnnnnnnnnnnnnnnnnnnnnnnnnnnnnnnnnnnnnnnnnnnnnnnnnnnnnnnnnnnnnnnnnnnnnnnnnnnnnnnnnnnnnnnnnnnnnnnnnnnnnnnnnnnnnnnnnnnnnnnnnnnnnnnnnnnnnnnnnnnnnnnnnnnnnnnnnnnnnnnnnnnnnnnnnnnnnnnnnnnnnnnnnnnnnnnnnnnnnnnnnnnnnnnnnnnnnnnnnnnnnnnnnnnnnnnnnnnnnnnnnnnnnnnnnnnnnnnnnnnnnnnnnnnnnnnnnnnnnnnnnnnnnnnnnnnnnnnnnnnnnnnnnnnnnnnnnnnnnnnnnnnnnnnnnnnnnnnnnnnnnnnnnnnnnnnnnnnnnnnnnnnnnnnnnnnnnnnnnnnnnnnnnnnnnnnnnnnnnnnnnnnnnnnnnnnnnnnnnnnnnnnnnnnnnnnnnnnnnnnnnnnnnnnnnnnnnnnnnnnnnnnnnnnnnnnnnnnnnnnnnnnnnnnnnnnnnnnnnnnnnnnnnnnnnnnnnnnnnnnnnnnnnnnnnnnnnnnnnnnnnnnnnnnnnnnnnnnnnnnnnnnnnnnnnnnnnnnnnnnnnnnnnnnnnnnnnnnnnnnnnnnnnnnnnnnnnnnnnnnnnnnnnnnnnnnnnnnnnnnnnnnnnnnnnnnnnnnnnnnnnnnnnnnnnnnnnnnnnnnnnnnnnnnnnnnnnnnnnnnnnnnnnnnnnnnnnnnnnnnnnnnnnnnnnnnnnnnnnnnnnnnnnnnnnnnnnnnnnnnnnnnnnnnnnnnnnnnnnnnnnnnnnnnnnnnnnnnnnnnnnnnnnnnnnnnnnnnnnnnnnnnnnnnnnnnnnnnnnnnnnnnnnnnnnnnnnnnnnnnnnnnnnnnnnnnnnnnnnnnnnnnnnnnnnnnnnnnnnnnnnnnnnnnnnnnnnnnnnnnnnnnnnnnnnnnnnnnnnnnnnnnnnnnnnnnnnnnnnnnnnnnnnnnnnnnnnnnnnnnnnnnnnnnnnnnnnnnnnnnnnnnnnnnnnnnnnnnnnnnnnnnnnnnnnnnnnnnnnnnnnnnnnnnnnnnnnnnnnnnnnnnnnnnnnnnnnnnnnnnnnnnnnnnnnnnnnnnnnnnnnnnnnnnnnnnnnnnnnnnnnnnnnnnnnnnnnnnnnnnnnnnnnnnnnnnnnnnnnnnnnnnnnnnnnnnnnnnnnnnnnnnnnnnnnnnnnnnnnnnnnnnnnnnnnnnnnnnnnnnnnnnnnnnnnnnnnnnnnnnnnnnnnnnnnnnnnnnnnnnnnnnnnnnnnnnnnnnnnnnnnnnnnnnnnnnnnnnnnnnnnnnnnnnnnnnnnnnnnnnnnnnnnnnnnnnnnnnnnnnnnnnnnnnnnnnnnnnnnnnnnnnnnnnnnnnnnnnnnnnnnnnnnnnnnnnnnnnnnnnnnnnnnnnnnnnnnnnnnnnnnnnnnnnnnnnnnnnnnnnnnnnnnnnnnnnnnnnnnnnnnnnnnnnnnnnnnnnnnnnnnnnnnnnnnnnnnnnnnnnnnnnnnnnnnnnnnnnnnnnnnnnnnnnnnnnnnnnnnnnnnnnnnnnnnnnnnnnnnnnnnnnnnnnnnnnnnnnnnnnnnnnnnnnnnnnnnnnnnnnnnnnnnnnnnnnnnnnnnnnnnnnnnnnnnnnnnnnnnnnnnnnnnnnnnnnnnnnnnnnnnnnnnnnnnnnnnnnnnnnnnnnnnnnnnnnnnnnnnnnnnnnnnnnnnnnnnnnnnnnnnnnnnnnnnnnnnnnnnnnnnnnnnnnnnnnnnnnnnnnnnnnnnnnnnnnnnnnnnnnnnnnnnnnnnnnnnnnnnnnnnnnnnnnnnnnnnnnnnnnnnnnnnnnnnnnnnnnnnnnnnnnnnnnnnnnnnnnnnnnnnnnnnnnnnnnnnnnnnnnnnnnnnnnnnnnnnnnnnnnnnnnnnnnnnnnnnnnnnnnnnnnnnnnnnnnnnnnnnnnnnnnnnnnnnnnnnnnnnnnnnnnnnnnnnnnnnnnnnnnnnnnnnnnnnnnnnnnnnnnnnnnnnnnnnnnnnnnnnnnnnnnnnnnnnnnnnnnnnnnnnnnnnnnnnnnnnnnnnnnnnnnnnnnnnnnnnnnnnnnnnnnnnnnnnnnnnnnnnnnnnnnnnnnnnnnnnnnnnnnnnnnnnnnnnnnnnnnnnnnnnnnnnnnnnnnnnnnnnnnnnnnnnnnnnnnnnnnnnnnnnnnnnnnnnnnnnnnnnnnnnnnnnnnnnnnnnnnnnnnnnnnnnnnnnnnnnnnnnnnnnnnnnnnnnnnnnnnnnnnnnnnnnnnnnnnnnnnnnnnnnnnnnnnnnnnnnnnnnnnnnnnnnnnnnnnnnnnnnnnnnnnnnnnnnnnnnnnnnnnnnnnnnnnnnnnnnnnnnnnnnnnnnnnnnnnnnnnnnnnnnnnnnnnnnnnnnnnnnnnnnnnnnnnnnnnnnnnnnnnnnnnnnnnnnnnnnnnnnnnnnnnnnnnnnnnnnnnnnnnnnnnnnnnnnnnnnnnnnnnnnnnnnnnnnnnnnnnnnnnnnnnnnnnnnnnnnnnnnnnnnnnnnnnnnnnnnnnnnnnnnnnnnnnnnnnnnnnnnnnnnnnnnnnnnnnnnnnnnnnnnnnnnnnnnnnnnnnnnnnnnnnnnnnnnnnnnnnnnnnnnnnnnnnnnnnnnnnnnnnnnnnnnnnnnnnnnnnnnnnnnnnnnnnnnnnnnnnnnnnnnnnnnnnnnnnnnnnnnnnnnnnnnnnnnnnnnnnnnnnnnnnnnnnnnnnnnnnnnnnnnnnnnnnnnnnnnnnnnnnnnnnnnnnnnnnnnnnnnnnnnnnnnnnnnnnnnnnnnnnnnnnnnnnnnnnnnnnnnnnnnnnnnnnnnnnnnnnnnnnnnnnnnnnnnnnnnnnnnnnnnnnnnnnnnnnnnnnnnnnnnnnnnnnnnnnnnnnnnnnnnnnnnnnnnnnnnnnnnnnnnnnnnnnnnnnnnnnnnnnnnnnnnnnnnnnnnnnnnnnnnnnnnnnnnnnnnnnnnnnnnnnnnnnnnnnnnnnnnnnnnnnnnnnnnnnnnnnnnnnnnnnnnnnnnnnnnnnnnnnnnnnnnnnnnnnnnnnnnnnnnnnnnnnnnnnnnnnnnnnnnnnnnnnnnnnnnnnnnnnnnnnnnnnnnnnnnnnnnnnnnnnnnnnnnnnnnnnnnnnnnnnnnnnnnnnnnnnnnnnnnnnnnnnnnnnnnnnnnnnnnnnnnnnnnnnnnnnnnnnnnnnnnnnnnnnnnnnnnnnnnnnnnnnnnnnnnnnnnnnnnnnnnnnnnnnnnnnnnnnnnnnnnnnnnnnnnnnnnnnnnnnnnnnnnnnnnnnnnnnnnnnnnnnnnnnnnnnnnnnnnnnnnnnnnnnnnnnnnnnnnnnnnnnnnnnnnnnnnnnnnnnnnnnnnnnnnnnnnnnnnnnnnnnnnnnnnnnnnnnnnnnnnnnnnnnnnnnnnnnnnnnnnnnnnnnnnnnnnnnnnnnnnnnnnnnnnnnnnnnnnnnnnnnnnnnnnnnnnnnnnnnnnnnnnnnnnnnnnnnnnnnnnnnnnnnnnnnnnnnnnnnnnnnnnnnnnnnnnnnnnnnnnnnnnnnnnnnnnnnnnnnnnnnnnnnnnnnnnnnnnnnnnnnnnnnnnnnnnnnnnnnnnnnnnnnnnnnnnnnnnnnnnnnnnnnnnnnnnnnnnnnnnnnnnnnnnnnnnnnnnnnnnnnnnnnnnnnnnnnnnnnnnnnnnnnnnnnnnnnnnnnnnnnnnnnnnnnnnnnnnnnnnnnnnnnnnnnnnnnnnnnnnnnnnnnnnnnnnnnnnnnnnnnnnnnnnnnnnnnnnnnnnnnnnnnnnnnnnnnnnnnnnnnnnnnnnnnnnnnnnnnnnnnnnnnnnnnnnnnnnnnnnnnnnnnnnnnnnnnnnnnnnnnnnnnnnnnnnnnnnnnnnnnnnnnnnnnnnnnnnnnnnnnnnnnnnnnnnnnnnnnnnnnnnnnnnnnnnnnnnnnnnnnnnnnnnnnnnnnnnnnnnnnnnnnnnnnnnnnnnnnnnnnnnnnnnnnnnnnnnnnnnnnnnnnnnnnnnnnnnnnnnnnnnnnnnnnnnnnnnnnnnnnnnnnnnnnnnnnnnnnnnnnnnnnnnnnnnnnnnnnnnnnnnnnnnnnnnnnnnnnnnnnnnnnnnnnnnnnnnnnnnnnnnnnnnnnnnnnnnnnnnnnnnnnnnnnnnnnnnnnnnnnnnnnnnnnnnnnnnnnnnnnnnnnnnnnnnnnnnnnnnnnnnnnnnnnnnnnnnnnnnnnnnnnnnnnnnnnnnnnnnnnnnnnnnnnnnnnnnnnnnnnnnnnnnnnnnnnnnnnnnnnnnnnnnnnnnnnnnnnnnnnnnnnnnnnnnnnnnnnnnnnnnnnnnnnnnnnnnnnnnnnnnnnnnnnnnnnnnnnnnnnnnnnnnnnnnnnnnnnnnnnnnnnnnnnnnnnnnnnnnnnnnnnnnnnnnnnnnnnnnnnnnnnnnnnnnnnnnnnnnnnnnnnnnnnnnnnnnnnnnnnnnnnnnnnnnnnnnnnnnnnnnnnnnnnnnnnnnnnnnnnnnnnnnnnnnnnnnnnnnnnnnnnnnnnnnnnnnnnnnnnnnnnnnnnnnnnnnnnnnnnnnnnnnnnnnnnnnnnnnnnnnnnnnnnnnnnnnnnnnnnnnnnnnnnnnnnnnnnnnnnnnnnnnnnnnnnnnnnnnnnnnnnnnnnnnnnnnnnnnnnnnnnnnnnnnnnnnnnnnnnnnnnnnnnnnnnnnnnnnnnnnnnnnnnnnnnnnnnnnnnnnnnnnnnnnnnnnnnnnnnnnnnnnnnnnnnnnnnnnnnnnnnnnnnnnnnnnnnnnnnnnnnnnnnnnnnnnnnnnnnnnnnnnnnnnnnnnnnnnnnnnnnnnnnnnnnnnnnnnnnnnnnnnnnnnnnnnnnnnnnnnnnnnnnnnnnnnnnnnnnnnnnnnnnnnnnnnnnnnnnnnnnnnnnnnnnnnnnnnnnnnnnnnnnnnnnnnnnnnnnnnnnnnnnnnnnnnnnnnnnnnnnnnnnnnnnnnnnnnnnnnnnnnnnnnnnnnnnnnnnnnnnnnnnnnnnnnnnnnnnnnnnnnnnnnnnnnnnnnnnnnnnnnnnnnnnnnnnnnnnnnnnnnnnnnnnnnnnnnnnnnnnnnnnnnnnnnnnnnnnnnnnnnnnnnnnnnnnnnnnnnnnnnnnnnnnnnnnnnnnnnnnnnnnnnnnnnnnnnnnnnnnnnnnnnnnnnnnnnnnnnnnnnnnnnnnnnnnnnnnnnnnnnnnnnnnnnnnnnnnnnnnnnnnnnnnnnnnnnnnnnnnnnnnnnnnnnnnnnnnnnnnnnnnnnnnnnnnnnnnnnnnnnnnnnnnnnnnnnnnnnnnnnnnnnnnnnnnnnnnnnnnnnnnnnnnnnnnnnnnnnnnnnnnnnnnnnnnnnnnnnnnnnnnnnnnnnnnnnnnnnnnnnnnnnnnnnnnnnnnnnnnnnnnnnnnnnnnnnnnnnnnnnnnnnnnnnnnnnnnnnnnnnnnnnnnnnnnnnnnnnnnnnnnnnnnnnnnnnnnnnnnnnnnnnnnnnnnnnnnnnnnnnnnnnnnnnnnnnnnnnnnnnnnnnnnnnnnnnnnnnnnnnnnnnnnnnnnnnnnnnnnnnnnnnnnnnnnnnnnnnnnnnnnnnnnnnnnnnnnnnnnnnnnnnnnnnnnnnnnnnnnnnnnnnnnnnnnnnnnnnnnnnnnnnnnnnnnnnnnnnnnnnnnnnnnnnnnnnnnnnnnnnnnnnnnnnnnnnnnnnnnnnnnnnnnnnnnnnnnnnnnnnnnnnnnnnnnnnnnnnnnnnnnnnnnnnnnnnnnnnnnnnnnnnnnnnnnnnnnnnnnnnnnnnnnnnnnnnnnnnnnnnnnnnnnnnnnnnnnnnnnnnnnnnnnnnnnnnnnnnnnnnnnnnnnnnnnnnnnnnnnnnnnnnnnnnnnnnnnnnnnnnnnnnnnnnnnnnnnnnnnnnnnnnnnnnnnnnnnnnnnnnnnnnnnnnnnnnnnnnnnnnnnnnnnnnnnnnnnnnnnnnnnnnnnnnnnnnnnnnnnnnnnnnnnnnnnnnnnnnnnnnnnnnnnnnnnnnnnnnnnnnnnnnnnnnnnnnnnnnnnnnnnnnnnnnnnnnnnnnnnnnnnnnnnnnnnnnnnnnnnnnnnnnnnnnnnnnnnnnnnnnnnnnnnnnnnnnnnnnnnnnnnnnnnnnnnnnnnnnnnnnnnnnnnnnnnnnnnnnnnnnnnnnnnnnnnnnnnnnnnnnnnnnnnnnnnnnnnnnnnnnnnnnnnnnnnnnnnnnnnnnnnnnnnnnnnnnnnnnnnnnnnnnnnnnnnnnnnnnnnnnnnnnnnnnnnnnnnnnnnnnnnnnnnnnnnnnnnnnnnnnnnnnnnnnnnnnnnnnnnnnnnnnnnnnnnnnnnnnnnnnnnnnnnnnnnnnnnnnnnnnnnnnnnnnnnnnnnnnnnnnnnnnnnnnnnnnnnnnnnnnnnnnnnnnnnnnnnnnnnnnnnnnnnnnnnnnnnnnnnnnnnnnnnnnnnnnnnnnnnnnnnnnnnnnnnnnnnnnnnnnnnnnnnnnnnnnnnnnnnnnnnnnnnnnnnnnnnnnnnnnnnnnnnnnnnnnnnnnnnnnnnnnnnnnnnnnnnnnnnnnnnnnnnnnnnnnnnnnnnnnnnnnnnnnnnnnnnnnnnnnnnnnnnnnnnnnnnnnnnnnnnnnnnnnnnnnnnnnnnnnnnnnnnnnnnnnnnnnnnnnnnnnnnnnnnnnnnnnnnnnnnnnnnnnnnnnnnnnnnnnnnnnnnnnnnnnnnnnnnnnnnnnnnnnnnnnnnnnnnnnnnnnnnnnnnnnnnnnnnnnnnnnnnnnnnnnnnnnnnnnnnnnnnnnnnnnnnnnnnnnnnnnnnnnnnnnnnnnnnnnnnnnnnnnnnnnnnnnnnnnnnnnnnnnnnnnnnnnnnnnnnnnnnnnnnnnnnnnnnnnnnnnnnnnnnnnnnnnnnnnnnnnnnnnnnnnnnnnnnnnnnnnnnnnnnnnnnnnnnnnnnnnnnnnnnnnnnnnnnnnnnnnnnnnnnnnnnnnnnnnnnnnnnnnnnnnnnnnnnnnnnnnnnnnnnnnnnnnnnnnnnnnnnnnnnnnnnnnnnnnnnnnnnnnnnnnnnnnnnnnnnnnnnnnnnnnnnnnnnnnnnnnnnnnnnnnnnnnnnnnnnnnnnnnnnnnnnnnnnnnnnnnnnnnnnnnnnnnnnnnnnnnnnnnnnnnnnnnnnnnnnnnnnnnnnnnnnnnnnnnnnnnnnnnnnnnnnnnnnnnnnnnnnnnnnnnnnnnnnnnnnnnnnnnnnnnnnnnnnnnnnnnnnnnnnnnnnnnnnnnnnnnnnnnnnnnnnnnnnnnnnnnnnnnnnnnnnnnnnnnnnnnnnnnnnnnnnnnnnnnnnnnnnnnnnnnnnnnnnnnnnnnnnnnnnnnnnnnnnnnnnnnnnnnnnnnnnnnnnnnnnnnnnnnnnnnnnnnnnnnnnnnnnnnnnnnnnnnnnnnnnnnnnnnnnnnnnnnnnnnnnnnnnnnnnnnnnnnnnnnnnnnnnnnnnnnnnnnnnnnnnnnnnnnnnnnnnnnnnnnnnnnnnnnnnnnnnnnnnnnnnnnnnnnnnnnnnnnnnnnnnnnnnnnnnnnnnnnnnnnnnnnnnnnnnnnnnnnnnnnnnnnnnnnnnnnnnnnnnnnnnnnnnnnnnnnnnnnnnnnnnnnnnnnnnnnnnnnnnnnnnnnnnnnnnnnnnnnnnnnnnnnnnnnnnnnnnnnnnnnnnnnnnnnnnnnnnnnnnnnnnnnnnnnnnnnnnnnnnnnnnnnnnnnnnnnnnnnnnnnnnnnnnnnnnnnnnnnnnnnnnnnnnnnnnnnnnnnnnnnnnnnnnnnnnnnnnnnnnnnnnnnnnnnnnnnnnnnnnnnnnnnnnnnnnnnnnnnnnnnnnnnnnnnnnnnnnnnnnnnnnnnnnnnnnnnnnnnnnnnnnnnnnnnnnnnnnnnnnnnnnnnnnnnnnnnnnnnnnnnnnnnnnnnnnnnnnnnnnnnnnnnnnnnnnnnnnnnnnnnnnnnnnnnnnnnnnnnnnnnnnnnnnnnnnnnnnnnnnnnnnnnnnnnnnnnnnnnnnnnnnnnnnnnnnnnnnnnnnnnnnnnnnnnnnnnnnnnnnnnnnnnnnnnnnnnnnnnnnnnnnnnnnnnnnnnnnnnnnnnnnnnnnnnnnnnnnnnnnnnnnnnnnnnnnnnnnnnnnnnnnnnnnnnnnnnnnnnnnnnnnnnnnnnnnnnnnnnnnnnnnnnnnnnnnnnnnnnnnnnnnnnnnnnnnnnnnnnnnnnnnnnnnnnnnnnnnnnnnnnnnnnnnnnnnnnnnnnnnnnnnnnnnnnnnnnnnnnnnnnnnnnnnnnnnnnnnnnnnnnnnnnnnnnnnnnnnnnnnnnnnnnnnnnnnnnnnnnnnnnnnnnnnnnnnnnnnnnnnnnnnnnnnnnnnnnnnnnnnnnnnnnnnnnnnnnnnnnnnnnnnnnnnnnnnnnnnnnnnnnnnnnnnnnnnnnnnnnnnnnnnnnnnnnnnnnnnnnnnnnnnnnnnnnnnnnnnnnnnnnnnnnnnnnnnnnnnnnnnnnnnnnnnnnnnnnnnnnnnnnnnnnnnnnnnnnnnnnnnnnnnnnnnnnnnnnnnnnnnnnnnnnnnnnnnnnnnnnnnnnnnnnnnnnnnnnnnnnnnnnnnnnnnnnnnnnnnnnnnnnnnnnnnnnnnnnnnnnnnnnnnnnnnnnnnnnnnnnnnnnnnnnnnnnnnnnnnnnnnnnnnnnnnnnnnnnnnnnnnnnnnnnnnnnnnnnnnnnnnnnnnnnnnnnnnnnnnnnnnnnnnnnnnnnnnnnnnnnnnnnnnnnnnnnnnnnnnnnnnnnnnnnnnnnnnnnnnnnnnnnnnnnnnnnnnnnnnnnnnnnnnnnnnnnnnnnnnnnnnnnnnnnnnnnnnnnnnnnnnnnnnnnnnnnnnnnnnnnnnnnnnnnnnnnnnnnnnnnnnnnnnnnnnnnnnnnnnnnnnnnnnnnnnnnnnnnnnnnnnnnnnnnnnnnnnnnnnnnnnnnnnnnnnnnnnnnnnnnnnnnnnnnnnnnnnnnnnnnnnnnnnnnnnnnnnnnnnnnnnnnnnnnnnnnnnnnnnnnnnnnnnnnnnnnnnnnnnnnnnnnnnnnnnnnnnnnnnnnnnnnnnnnnnnnnnnnnnnnnnnnnnnnnnnnnnnnnnnnnnnnnnnnnnnnnnnnnnnnnnnnnnnnnnnnnnnnnnnnnnnnnnnnnnnnnnnnnnnnnnnnnnnnnnnnnnnnnnnnnnnnnnnnnnnnnnnnnnnnnnnnnnnnnnnnnnnnnnnnnnnnnnnnnnnnnnnnnnnnnnnnnnnnnnnnnnnnnnnnnnnnnnnnnnnnnnnnnnnnnnnnnnnnnnnnnnnnnnnnnnnnnnnnnnnnnnnnnnnnnnnnnnnnnnnnnnnnnnnnnnnnnnnnnnnnnnnnnnnnnnnnnnnnnnnnnnnnnnnnnnnnnnnnnnnnnnnnnnnnnnnnnnnnnnnnnnnnnnnnnnnnnnnnnnnnnnnnnnnnnnnnnnnnnnnnnnnnnnnnnnnnnnnnnnnnnnnnnnnnnnnnnnnnnnnnnnnnnnnnnnnnnnnnnnnnnnnnnnnnnnnnnnnnnnnnnnnnnnnnnnnnnnnnnnnnnnnnnnnnnnnnnnnnnnnnnnnnnnnnnnnnnnnnnnnnnnnnnnnnnnnnnnnnnnnnnnnnnnnnnnnnnnnnnnnnnnnnnnnnnnnnnnnnnnnnnnnnnnnnnnnnnnnnnnnnnnnnnnnnnnnnnnnnnnnnnnnnnnnnnnnnnnnnnnnnnnnnnnnnnnnnnnnnnnnnnnnnnnnnnnnnnnnnnnnnnnnnnnnnnnnnnnnnnnnnnnnnnnnnnnnnnnnnnnnnnnnnnnnnnnnnnnnnnnnnnnnnnnnnnnnnnnnnnnnnnnnnnnnnnnnnnnnnnnnnnnnnnnnnnnnnnnnnnnnnnnnnnnnnnnnnnnnnnnnnnnnnnnnnnnnnnnnnnnnnnnnnnnnnnnnnnnnnnnnnnnnnnnnnnnnnnnnnnnnnnnnnnnnnnnnnnnnnnnnnnnnnnnnnnnnnnnnnnnnnnnnnnnnnnnnnnnnnnnnnnnnnnnnnnnnnnnnnnnnnnnnnnnnnnnnnnnnnnnnnnnnnnnnnnnnnnnnnnnnnnnnnnnnnnnnnnnnnnnnnnnnnnnnnnnnnnnnnnnnnnnnnnnnnnnnnnnnnnnnnnnnnnnnnnnnnnnnnnnnnnnnnnnnnnnnnnnnnnnnnnnnnnnnnnnnnnnnnnnnnnnnnnnnnnnnnnnnnnnnnnnnnnnnnnnnnnnnnnnnnnnnnnnnnnnnnnnnnnnnnnnnnnnnnnnnnnnnnnnnnnnnnnnnnnnnnnnnnnnnnnnnnnnnnnnnnnnnnnnnnnnnnnnnnnnnnnnnnnnnnnnnnnnnnnnnnnnnnnnnnnnnnnnnnnnnnnnnnnnnnnnnnnnnnnnnnnnnnnnnnnnnnnnnnnnnnnnnnnnnnnnnnnnnnnnnnnnnnnnnnnnnnnnnnnnnnnnnnnnnnnnnnnnnnnnnnnnnnnnnnnnnnnnnnnnnnnnnnnnnnnnnnnnnnnnnnnnnnnnnnnnnnnnnnnnnnnnnnnnnnnnnnnnnnnnnnnnnnnnnnnnnnnnnnnnnnnnnnnnnnnnnnnnnnnnnnnnnnnnnnnnnnnnnnnnnnnnnnnnnnnnnnnnnnnnnnnnnnnnnnnnnnnnnnnnnnnnnnnnnnnnnnnnnnnnnnnnnnnnnnnnnnnnnnnnnnnnnnnnnnnnnnnnnnnnnnnnnnnnnnnnnnnnnnnnnnnnnnnnnnnnnnnnnnnnnnnnnnnnnnnnnnnnnnnnnnnnnnnnnnnnnnnnnnnnnnnnnnnnnnnnnnnnnnnnnnnnnnnnnnnnnnnnnnnnnnnnnnnnnnnnnnnnnnnnnnnnnnnnnnnnnnnnnnnnnnnnnnnnnnnnnnnnnnnnnnnnnnnnnnnnnnnnnnnnnnnnnnnnnnnnnnnnnnnnnnnnnnnnnnnnnnnnnnnnnnnnnnnnnnnnnnnnnnnnnnnnnnnnnnnnnnnnnnnnnnnnnnnnnnnnnnnnnnnnnnnnnnnnnnnnnnnnnnnnnnnnnnnnnnnnnnnnnnnnnnnnnnnnnnnnnnnnnnnnnnnnnnnnnnnnnnnnnnnnnnnnnnnnnnnnnnnnnnnnnnnnnnnnnnnnnnnnnnnnnnnnnnnnnnnnnnnnnnnnnnnnnnnnnnnnnnnnnnnnnnnnnnnnnnnnnnnnnnnnnnnnnnnnnnnnnnnnnnnnnnnnnnnnnnnnnnnnnnnnnnnnnnnnnnnnnnnnnnnnnnnnnnnnnnnnnnnnnnnnnnnnnnnnnnnnnnnnnnnnnnnnnnnnnnnnnnnnnnnnnnnnnnnnnnnnnnnnnnnnnnnnnnnnnnnnnnnnnnnnnnnnnnnnnnnnnnnnnnnnnnnnnnnnnnnnnnnnnnnnnnnnnnnnnnnnnnnnnnnnnnnnnnnnnnnnnnnnnnnnnnnnnnnnnnnnnnnnnnnnnnnnnnnnnnnnnnnnnnnnnnnnnnnnnnnnnnnnnnnnnnnnnnnnnnnnnnnnnnnnnnnnnnnnnnnnnnnnnnnnnnnnnnnnnnnnnnnnnnnnnnnnnnnnnnnnnnnnnnnnnnnnnnnnnnnnnnnnnnnnnnnnnnnnnnnnnnnnnnnnnnnnnnnnnnnnnnnnnnnnnnnnnnnnnnnnnnnnnnnnnnnnnnnnnnnnnnnnnnnnnnnnnnnnnnnnnnnnnnnnnnnnnnnnnnnnnnnnnnnnnnnnnnnnnnnnnnnnnnnnnnnnnnnnnnnnnnnnnnnnnnnnnnnnnnnnnnnnnnnnnnnnnnnnnnnnnnnnnnnnnnnnnnnnnnnnnnnnnnnnnnnnnnnnnnnnnnnnnnnnnnnnnnnnnnnnnnnnnnnnnnnnnnnnnnnnnnnnnnnnnnnnnnnnnnnnnnnnnnnnnnnnnnnnnnnnnnnnnnnnnnnnnnnnnnnnnnnnnnnnnnnnnnnnnnnnnnnnnnnnnnnnnnnnnnnnnnnnnnnnnnnnnnnnnnnnnnnnnnnnnnnnnnnnnnnnnnnnnnnnnnnnnnnnnnnnnnnnnnnnnnnnnnnnnnnnnnnnnnnnnnnnnnnnnnnnnnnnnnnnnnnnnnnnnnnnnnnnnnnnnnnnnnnnnnnnnnnnnnnnnnnnnnnnnnnnnnnnnnnnnnnnnnnnnnnnnnnnnnnnnnnnnnnnnnnnnnnnnnnnnnnnnnnnnnnnnnnnnnnnnnnnnnnnnnnnnnnnnnnnnnnnnnnnnnnnnnnnnnnnnnnnnnnnnnnnnnnnnnnnnnnnnnnnnnnnnnnnnnnnnnnnnnnnnnnnnnnnnnnnnnnnnnnnnnnnnnnnnnnnnnnnnnnnnnnnnnnnnnnnnnnnnnnnnnnnnnnnnnnnnnnnnnnnnnnnnnnnnnnnnnnnnnnnnnnnnnnnnnnnnnnnnnnnnnnnnnnnnnnnnnnnnnnnnnnnnnnnnnnnnnnnnnnnnnnnnnnnnnnnnnnnnnnnnnnnnnnnnnnnnnnnnnnnnnnnnnnnnnnnnnnnnnnnnnnnnnnnnnnnnnnnnnnnnnnnnnnnnnnnnnnnnnnnnnnnnnnnnnnnnnnnnnnnnnnnnnnnnnnnnnnnnnnnnnnnnnnnnnnnnnnnnnnnnnnnnnnnnnnnnnnnnnnnnnnnnnnnnnnnnnnnnnnnnnnnnnnnnnnnnnnnnnnnnnnnnnnnnnnnnnnnnnnnnnnnnnnnnnnnnnnnnnnnnnnnnnnnnnnnnnnnnnnnnnnnnnnnnnnnnnnnnnnnnnnnnnnnnnnnnnnnnnnnnnnnnnnnnnnnnnnnnnnnnnnnnnnnnnnnnnnnnnnnnnnnnnnnnnnnnnnnnnnnnnnnnnnnnnnnnnnnnnnnnnnnnnnnnnnnnnnnnnnnnnnnnnnnnnnnnnnnnnnnnnnnnnnnnnnnnnnnnnnnnnnnnnnnnnnnnnnnnnnnnnnnnnnnnnnnnnnnnnnnnnnnnnnnnnnnnnnnnnnnnnnnnnnnnnnnnnnnnnnnnnnnnnnnnnnnnnnnnnnnnnnnnnnnnnnnnnnnnnnnnnnnnnnnnnnnnnnnnnnnnnnnnnnnnnnnnnnnnnnnnnnnnnnnnnnnnnnnnnnnnnnnnnnnnnnnnnnnnnnnnnnnnnnnnnnnnnnnnnnnnnnnnnnnnnnnnnnnnnnnnnnnnnnnnnnnnnnnnnnnnnnnnnnnnnnnnnnnnnnnnnnnnnnnnnnnnnnnnnnnnnnnnnnnnnnnnnnnnnnnnnnnnnnnnnnnnnnnnnnnnnnnnnnnnnnnnnnnnnnnnnnnnnnnnnnnnnnnnnnnnnnnnnnnnnnnnnnnnnnnnnnnnnnnnnnnnnnnnnnnnnnnnnnnnnnnnnnnnnnnnnnnnnnnnnnnnnnnnnnnnnnnnnnnnnnnnnnnnnnnnnnnnnnnnnnnnnnnnnnnnnnnnnnnnnnnnnnnnnnnnnnnnnnnnnnnnnnnnnnnnnnnnnnnnnnnnnnnnnnnnnnnnnnnnnnnnnnnnnnnnnnnnnnnnnnnnnnnnnnnnnnnnnnnnnnnnnnnnnnnnnnnnnnnnnnnnnnnnnnnnnnnnnnnnnnnnnnnnnnnnnnnnnnnnnnnnnnnnnnnnnnnnnnnnnnnnnnnnnnnnnnnnnnnnnnnnnnnnnnnnnnnnnnnnnnnnnnnnnnnnnnnnnnnnnnnnnnnnnnnnnnnnnnnnnnnnnnnnnnnnnnnnnnnnnnnnnnnnnnnnnnnnnnnnnnnnnnnnnnnnnnnnnnnnnnnnnnnnnnnnnnnnnnnnnnnnnnnnnnnnnnnnnnnnnnnnnnnnnnnnnnnnnnnnnnnnnnnnnnnnnnnnnnnnnnnnnnnnnnnnnnnnnnnnnnnnnnnnnnnnnnnnnnnnnnnnnnnnnnnnnnnnnnnnnnnnnnnnnnnnnnnnnnnnnnnnnnnnnnnnnnnnnnnnnnnnnnnnnnnnnnnnnnnnnnnnnnnnnnnnnnnnnnnnnnnnnnnnnnnnnnnnnnnnnnnnnnnnnnnnnnnnnnnnnnnnnnnnnnnnnnnnnnnnnnnnnnnnnnnnnnnnnnnnnnnnnnnnnnnnnnnnnnnnnnnnnnnnnnnnnnnnnnnnnnnnnnnnnnnnnnnnnnnnnnnnnnnnnnnnnnnnnnnnnnnnnnnnnnnnnnnnnnnnnnnnnnnnnnnnnnnnnnnnnnnnnnnnnnnnnnnnnnnnnnnnnnnnnnnnnnnnnnnnnnnnnnnnnnnnnnnnnnnnnnnnnnnnnnnnnnnnnnnnnnnnnnnnnnnnnnnnnnnnnnnnnnnnnnnnnnnnnnnnnnnnnnnnnnnnnnnnnnnnnnnnnnnnnnnnnnnnnnnnnnnnnnnnnnnnnnnnnnnnnnnnnnnnnnnnnnnnnnnnnnnnnnnnnnnnnnnnnnnnnnnnnnnnnnnnnnnnnnnnnnnnnnnnnnnnnnnnnnnnnnnnnnnnnnnnnnnnnnnnnnnnnnnnnnnnnnnnnnnnnnnnnnnnnnnnnnnnnnnnnnnnnnnnnnnnnnnnnnnnnnnnnnnnnnnnnnnnnnnnnnnnnnnnnnnnnnnnnnnnnnnnnnnnnnnnnnnnnnnnnnnnnnnnnnnnnnnnnnnnnnnnnnnnnnnnnnnnnnnnnnnnnnnnnnnnnnnnnnnnnnnnnnnnnnnnnnnnnnnnnnnnnnnnnnnnnnnnnnnnnnnnnnnnnnnnnnnnnnnnnnnnnnnnnnnnnnnnnnnnnnnnnnnnnnnnnnnnnnnnnnnnnnnnnnnnnnnnnnnnnnnnnnnnnnnnnnnnnnnnnnnnnnnnnnnnnnnnnnnnnnnnnnnnnnnnnnnnnnnnnnnnnnnnnnnnnnnnnnnnnnnnnnnnnnnnnnnnnnnnnnnnnnnnnnnnnnnnnnnnnnnnnnnnnnnnnnnnnnnnnnnnnnnnnnnnnnnnnnnnnnnnnnnnnnnnnnnnnnnnnnnnnnnnnnnnnnnnnnnnnnnnnnnnnnnnnnnnnnnnnnnnnnnnnnnnnnnnnnnnnnnnnnnnnnnnnnnnnnnnnnnnnnnnnnnnnnnnnnnnnnnnnnnnnnnnnnnnnnnnnnnnnnnnnnnnnnnnnnnnnnnnnnnnnnnnnnnnnnnnnnnnnnnnnnnnnnnnnnnnnnnnnnnnnnnnnnnnnnnnnnnnnnnnnnnnnnnnnnnnnnnnnnnnnnnnnnnnnnnnnnnnnnnnnnnnnnnnnnnnnnnnnnnnnnnnnnnnnnnnnnnnnnnnnnnnnnnnnnnnnnnnnnnnnnnnnnnnnnnnnnnnnnnnnnnnnnnnnnnnnnnnnnnnnnnnnnnnnnnnnnnnnnnnnnnnnnnnnnnnnnnnnnnnnnnnnnnnnnnnnnnnnnnnnnnnnnnnnnnnnnnnnnnnnnnnnnnnnnnnnnnnnnnnnnnnnnnnnnnnnnnnnnnnnnnnnnnnnnnnnnnnnnnnnnnnnnnnnnnnnnnnnnnnnnnnnnnnnnnnnnnnnnnnnnnnnnnnnnnnnnnnnnnnnnnnnnnnnnnnnnnnnnnnnnnnnnnnnnnnnnnnnnnnnnnnnnnnnnnnnnnnnnnnnnnnnnnnnnnnnnnnnnnnnnnnnnnnnnnnnnnnnnnnnnnnnnnnnnnnnnnnnnnnnnnnnnnnnnnnnnnnnnnnnnnnnnnnnnnnnnnnnnnnnnnnnnnnnnnnnnnnnnnnnnnnnnnnnnnnnnnnnnnnnnnnnnnnnnnnnnnnnnnnnnnnnnnnnnnnnnnnnnnnnnnnnnnnnnnnnnnnnnnnnnnnnnnnnnnnnnnnnnnnnnnnnnnnnnnnnnnnnnnnnnnnnnnnnnnnnnnnnnnnnnnnnnnnnnnnnnnnnnnnnnnnnnnnnnnnnnnnnnnnnnnnnnnnnnnnnnnnnnnnnnnnnnnnnnnnnnnnnnnnnnnnnnnnnnnnnnnnnnnnnnnnnnnnnnnnnnnnnnnnnnnnnnnnnnnnnnnnnnnnnnnnnnnnnnnnnnnnnnnnnnnnnnnnnnnnnnnnnnnnnnnnnnnnnnnnnnnnnnnnnnnnnnnnnnnnnnnnnnnnnnnnnnnnnnnnnnnnnnnnnnnnnnnnnnnnnnnnnnnnnnnnnnnnnnnnnnnnnnnnnnnnnnnnnnnnnnnnnnnnnnnnnnnnnnnnnnnnnnnnnnnnnnnnnnnnnnnnnnnnnnnnnnnnnnnnnnnnnnnnnnnnnnnnnnnnnnnnnnnnnnnnnnnnnnnnnnnnnnnnnnnnnnnnnnnnnnnnnnnnnnnnnnnnnnnnnnnnnnnnnnnnnnnnnnnnnnnnnnnnnnnnnnnnnnnnnnnnnnnnnnnnnnnnnnnnnnnnnnnnnnnnnnnnnnnnnnnnnnnnnnnnnnnnnnnnnnnnnnnnnnnnnnnnnnnnnnnnnnnnnnnnnnnnnnnnnnnnnnnnnnnnnnnnnnnnnnnnnnnnnnnnnnnnnnnnnnnnnnnnnnnnnnnnnnnnnnnnnnnnnnnnnnnnnnnnnnnnnnnnnnnnnnnnnnnnnnnnnnnnnnnnnnnnnnnnnnnnnnnnnnnnnnnnnnnnnnnnnnnnnnnnnnnnnnnnnnnnnnnnnnnnnnnnnnnnnnnnnnnnnnnnnnnnnnnnnnnnnnnnnnnnnnnnnnnnnnnnnnnnnnnnnnnnnnnnnnnnnnnnnnnnnnnnnnnnnnnnnnnnnnnnnnnnnnnnnnnnnnnnnnnnnnnnnnnnnnnnnnnnnnnnnnnnnnnnnnnnnnnnnnnnnnnnnnnnnnnnnnnnnnnnnnnnnnnnnnnnnnnnnnnnnnnnnnnnnnnnnnnnnnnnnnnnnnnnnnnnnnnnnnnnnnnnnnnnnnnnnnnnnnnnnnnnnnnnnnnnnnnnnnnnnnnnnnnnnnnnnnnnnnnnnnnnnnnnnnnnnnnnnnnnnnnnnnnnnnnnnnnnnnnnnnnnnnnnnnnnnnnnnnnnnnnnnnnnnnnnnnnnnnnnnnnnnnnnnnnnnnnnnnnnnnnnnnnnnnnnnnnnnnnnnnnnnnnnnnnnnnnnnnnnnnnnnnnnnnnnnnnnnnnnnnnnnnnnnnnnnnnnnnnnnnnnnnnnnnnnnnnnnnnnnnnnnnnnnnnnnnnnnnnnnnnnnnnnnnnnnnnnnnnnnnnnnnnnnnnnnnnnnnnnnnnnnnnnnnnnnnnnnnnnnnnnnnnnnnnnnnnnnnnnnnnnnnnnnnnnnnnnnnnnnnnnnnnnnnnnnnnnnnnnnnnnnnnnnnnnnnnnnnnnnnnnnnnnnnnnnnnnnnnnnnnnnnnnnnnnnnnnnnnnnnnnnnnnnnnnnnnnnnnnnnnnnnnnnnnnnnnnnnnnnnnnnnnnnnnnnnnnnnnnnnnnnnnnnnnnnnnnnnnnnnnnnnnnnnnnnnnnnnnnnnnnnnnnnnnnnnnnnnnnnnnnnnnnnnnnnnnnnnnnnnnnnnnnnnnnnnnnnnnnnnnnnnnnnnnnnnnnnnnnnnnnnnnnnnnnnnnnnnnnnnnnnnnnnnnnnnnnnnnnnnnnnnnnnnnnnnnnnnnnnnnnnnnnnnnnnnnnnnnnnnnnnnnnnnnnnnnnnnnnnnnnnnnnnnnnnnnnnnnnnnnnnnnnnnnnnnnnnnnnnnnnnnnnnnnnnnnnnnnnnnnnnnnnnnnnnnnnnnnnnnnnnnnnnnnnnnnnnnnnnnnnnnnnnnnnnnnnnnnnnnnnnnnnnnnnnnnnnnnnnnnnnnnnnnnnnnnnnnnnnnnnnnnnnnnnnnnnnnnnnnnnnnnnnnnnnnnnnnnnnnnnnnnnnnnnnnnnnnnnnnnnnnnnnnnnnnnnnnnnnnnnnnnnnnnnnnnnnnnnnnnnnnnnnnnnnnnnnnnnnnnnnnnnnnnnnnnnnnnnnnnnnnnnnnnnnnnnnnnnnnnnnnnnnnnnnnnnnnnnnnnnnnnnnnnnnnnnnnnnnnnnnnnnnnnnnnnnnnnnnnnnnnnnnnnnnnnnnnnnnnnnnnnnnnnnnnnnnnnnnnnnnnnnnnnnnnnnnnnnnnnnnnnnnnnnnnnnnnnnnnnnnnnnnnnnnnnnnnnnnnnnnnnnnnnnnnnnnnnnnnnnnnnnnnnnnnnnnnnnnnnnnnnnnnnnnnnnnnnnnnnnnnnnnnnnnnnnnnnnnnnnnnnnnnnnnnnnnnnnnnnnnnnnnnnnnnnnnnnnnnnnnnnnnnnnnnnnnnnnnnnnnnnnnnnnnnnnnnnnnnnnnnnnnnnnnnnnnnnnnnnnnnnnnnnnnnnnnnnnnnnnnnnnnnnnnnnnnnnnnnnnnnnnnnnnnnnnnnnnnnnnnnnnnnnnnnnnnnnnnnnnnnnnnnnnnnnnnnnnnnnnnnnnnnnnnnnnnnnnnnnnnnnnnnnnnnnnnnnnnnnnnnnnnnnnnnnnnnnnnnnnnnnnnnnnnnnnnnnnnnnnnnnnnnnnnnnnnnnnnnnnnnnnnnnnnnnnnnnnnnnnnnnnnnnnnnnnnnnnnnnnnnnnnnnnnnnnnnnnnnnnnnnnnnnnnnnnnnnnnnnnnnnnnnnnnnnnnnnnnnnnnnnnnnnnnnnnnnnnnnnnnnnnnnnnnnnnnnnnnnnnnnnnnnnnnnnnnnnnnnnnnnnnnnnnnnnnnnnnnnnnnnnnnnnnnnnnnnnnnnnnnnnnnnnnnnnnnnnnnnnnnnnnnnnnnnnnnnnnnnnnnnnnnnnnnnnnnnnnnnnnnnnnnnnnnnnnnnnnnnnnnnnnnnnnnnnnnnnnnnnnnnnnnnnnnnnnnnnnnnnnnnnnnnnnnnnnnnnnnnnnnnnnnnnnnnnnnnnnnnnnnnnnnnnnnnnnnnnnnnnnnnnnnnnnnnnnnnnnnnnnnnnnnnnnnnnnnnnnnnnnnnnnnnnnnnnnnnnnnnnnnnnnnnnnnnnnnnnnnnnnnnnnnnnnnnnnnnnnnnnnnnnnnnnnnnnnnnnnnnnnnnnnnnnnnnnnnnnnnnnnnnnnnnnnnnnnnnnnnnnnnnnnnnnnnnnnnnnnnnnnnnnnnnnnnnnnnnnnnnnnnnnnnnnnnnnnnnnnnnnnnnnnnnnnnnnnnnnnnnnnnnnnnnnnnnnnnnnnnnnnnnnnnnnnnnnnnnnnnnnnnnnnnnnnnnnnnnnnnnnnnnnnnnnnnnnnnnnnnnnnnnnnnnnnnnnnnnnnnnnnnnnnnnnnnnnnnnnnnnnnnnnnnnnnnnnnnnnnnnnnnnnnnnnnnnnnnnnnnnnnnnnnnnnnnnnnnnnnnnnnnnnnnnnnnnnnnnnnnnnnnnnnnnnnnnnnnnnnnnnnnnnnnnnnnnnnnnnnnnnnnnnnnnnnnnnnnnnnnnnnnnnnnnnnnnnnnnnnnnnnnnnnnnnnnnnnnnnnnnnnnnnnnnnnnnnnnnnnnnnnnnnnnnnnnnnnnnnnnnnnnnnnnnnnnnnnnnnnnnnnnnnnnnnnnnnnnnnnnnnnnnnnnnnnnnnnnnnnnnnnnnnnnnnnnnnnnnnnnnnnnnnnnnnnnnnnnnnnnnnnnnnnnnnnnnnnnnnnnnnnnnnnnnnnnnnnnnnnnnnnnnnnnnnnnnnnnnnnnnnnnnnnnnnnnnnnnnnnnnnnnnnnnnnnnnnnnnnnnnnnnnnnnnnnnnnnnnnnnnnnnnnnnnnnnnnnnnnnnnnnnnnnnnnnnnnnnnnnnnnnnnnnnnnnnnnnnnnnnnnnnnnnnnnnnnnnnnnnnnnnnnnnnnnnnnnnnnnnnnnnnnnnnnnnnnnnnnnnnnnnnnnnnnnnnnnnnnnnnnnnnnnnnnnnnnnnnnnnnnnnnnnnnnnnnnnnnnnnnnnnnnnnnnnnnnnnnnnnnnnnnnnnnnnnnnnnnnnnnnnnnnnnnnnnnnnnnnnnnnnnnnnnnnnnnnnnnnnnnnnnnnnnnnnnnnnnnnnnnnnnnnnnnnnnnnnnnnnnnnnnnnnnnnnnnnnnnnnnnnnnnnnnnnnnnnnnnnnnnnnnnnnnnnnnnnnnnnnnnnnnnnnnnnnnnnnnnnnnnnnnnnnnnnnnnnnnnnnnnnnnnnnnnnnnnnnnnnnnnnnnnnnnnnnnnnnnnnnnnnnnnnnnnnnnnnnnnnnnnnnnnnnnnnnnnnnnnnnnnnnnnnnnnnnnnnnnnnnnnnnnnnnnnnnnnnnnnnnnnnnnnnnnnnnnnnnnnnnnnnnnnnnnnnnnnnnnnnnnnnnnnnnnnnnnnnnnnnnnnnnnnnnnnnnnnnnnnnnnnnnnnnnnnnnnnnnnnnnnnnnnnnnnnnnnnnnnnnnnnnnnnnnnnnnnnnnnnnnnnnnnnnnnnnnnnnnnnnnnnnnnnnnnnnnnnnnnnnnnnnnnnnnnnnnnnnnnnnnnnnnnnnnnnnnnnnnnnnnnnnnnnnnnnnnnnnnnnnnnnnnnnnnnnnnnnnnnnnnnnnnnnnnnnnnnnnnnnnnnnnnnnnnnnnnnnnnnnnnnnnnnnnnnnnnnnnnnnnnnnnnnnnnnnnnnnnnnnnnnnnnnnnnnnnnnnnnnnnnnnnnnnnnnnnnnnnnnnnnnnnnnnnnnnnnnnnnnnnnnnnnnnnnnnnnnnnnnnnnnnnnnnnnnnnnnnnnnnnnnnnnnnnnnnnnnnnnnnnnnnnnnnnnnnnnnnnnnnnnnnnnnnnnnnnnnnnnnnnnnnnnnnnnnnnnnnnnnnnnnnnnnnnnnnnnnnnnnnnnnnnnnnnnnnnnnnnnnnnnnnnnnnnnnnnnnnnnnnnnnnnnnnnnnnnnnnnnnnnnnnnnnnnnnnnnnnnnnnnnnnnnnnnnnnnnnnnnnnnnnnnnnnnnnnnnnnnnnnnnnnnnnnnnnnnnnnnnnnnnnnnnnnnnnnnnnnnnnnnnnnnnnnnnnnnnnnnnnnnnnnnnnnnnnnnnnnnnnnnnnnnnnnnnnnnnnnnnnnnnnnnnnnnnnnnnnnnnnnnnnnnnnnnnnnnnnnnnnnnnnnnnnnnnnnnnnnnnnnnnnnnnnnnnnnnnnnnnnnnnnnnnnnnnnnnnnnnnnnnnnnnnnnnnnnnnnnnnnnnnnnnnnnnnnnnnnnnnnnnnnnnnnnnnnnnnnnnnnnnnnnnnnnnnnnnnnnnnnnnnnnnnnnnnnnnnnnnnnnnnnnnnnnnnnnnnnnnnnnnnnnnnnnnnnnnnnnnnnnnnnnnnnnnnnnnnnnnnnnnnnnnnnnnnnnnnnnnnnnnnnnnnnnnnnnnnnnnnnnnnnnnnnnnnnnnnnnnnnnnnnnnnnnnnnnnnnnnnnnnnnnnnnnnnnnnnnnnnnnnnnnnnnnnnnnnnnnnnnnnnnnnnnnnnnnnnnnnnnnnnnnnnnnnnnnnnnnnnnnnnnnnnnnnnnnnnnnnnnnnnnnnnnnnnnnnnnnnnnnnnnnnnnnnnnnnnnnnnnnnnnnnnnnnnnnnnnnnnnnnnnnnnnnnnnnnnnnnnnnnnnnnnnnnnnnnnnnnnnnnnnnnnnnnnnnnnnnnnnnnnnnnnnnnnnnnnnnnnnnnnnnnnnnnnnnnnnnnnnnnnnnnnnnnnnnnnnnnnnnnnnnnnnnnnnnnnnnnnnnnnnnnnnnnnnnnnnnnnnnnnnnnnnnnnnnnnnnnnnnnnnnnnnnnnnnnnnnnnnnnnnnnnnnnnnnnnnnnnnnnnnnnnnnnnnnnnnnnnnnnnnnnnnnnnnnnnnnnnnnnnnnnnnnnnnnnnnnnnnnnnnnnnnnnnnnnnnnnnnnnnnnnnnnnnnnnnnnnnnnnnnnnnnnnnnnnnnnnnnnnnnnnnnnnnnnnnnnnnnnnnnnnnnnnnnnnnnnnnnnnnnnnnnnnnnnnnnnnnnnnnnnnnnnnnnnnnnnnnnnnnnnnnnnnnnnnnnnnnnnnnnnnnnnnnnnnnnnnnnnnnnnnnnnnnnnnnnnnnnnnnnnnnnnnnnnnnnnnnnnnnnnnnnnnnnnnnnnnnnnnnnnnnnnnnnnnnnnnnnnnnnnnnnnnnnnnnnnnnnnnnnnnnnnnnnnnnnnnnnnnnnnnnnnnnnnnnnnnnnnnnnnnnnnnnnnnnnnnnnnnnnnnnnnnnnnnnnnnnnnnnnnnnnnnnnnnnnnnnnnnnnnnnnnnnnnnnnnnnnnnnnnnnnnnnnnnnnnnnnnnnnnnnnnnnnnnnnnnnnnnnnnnnnnnnnnnnnnnnnnnnnnnnnnnnnnnnnnnnnnnnnnnnnnnnnnnnnnnnnnnnnnnnnnnnnnnnnnnnnnnnnnnnnnnnnnnnnnnnnnnnnnnnnnnnnnnnnnnnnnnnnnnnnnnnnnnnnnnnnnnnnnnnnnnnnnnnnnnnnnnnnnnnnnnnnnnnnnnnnnnnnnnnnnnnnnnnnnnnnnnnnnnnnnnnnnnnnnnnnnnnnnnnnnnnnnnnnnnnnnnnnnnnnnnnnnnnnnnnnnnnnnnnnnnnnnnnnnnnnnnnnnnnnnnnnnnnnnnnnnnnnnnnnnnnnnnnnnnnnnnnnnnnnnnnnnnnnnnnnnnnnnnnnnnnnnnnnnnnnnnnnnnnnnnnnnnnnnnnnnnnnnnnnnnnnnnnnnnnnnnnnnnnnnnnnnnnnnnnnnnnnnnnnnnnnnnnnnnnnnnnnnnnnnnnnnnnnnnnnnnnnnnnnnnnnnnnnnnnnnnnnnnnnnnnnnnnnnnnnnnnnnnnnnnnnnnnnnnnnnnnnnnnnnnnnnnnnnnnnnnnnnnnnnnnnnnnnnnnnnnnnnnnnnnnnnnnnnnnnnnnnnnnnnnnnnnnnnnnnnnnnnnnnnnnnnnnnnnnnnnnnnnnnnnnnnnnnnnnnnnnnnnnnnnnnnnnnnnnnnnnnnnnnnnnnnnnnnnnnnnnnnnnnnnnnnnnnnnnnnnnnnnnnnnnnnnnnnnnnnnnnnnnnnnnnnnnnnnnnnnnnnnnnnnnnnnnnnnnnnnnnnnnnnnnnnnnnnnnnnnnnnnnnnnnnnnnnnnnnnnnnnnnnnnnnnnnnnnnnnnnnnnnnnnnnnnnnnnnnnnnnnnnnnnnnnnnnnnnnnnnnnnnnnnnnnnnnnnnnnnnnnnnnnnnnnnnnnnnnnnnnnnnnnnnnnnnnnnnnnnnnnnnnnnnnnnnnnnnnnnnnnnnnnnnnnnnnnnnnnnnnnnnnnnnnnnnnnnnnnnnnnnnnnnnnnnnnnnnnnnnnnnnnnnnnnnnnnnnnnnnnnnnnnnnnnnnnnnnnnnnnnnnnnnnnnnnnnnnnnnnnnnnnnnnnnnnnnnnnnnnnnnnnnnnnnnnnnnnnnnnnnnnnnnnnnnnnnnnnnnnnnnnnnnnnnnnnnnnnnnnnnnnnnnnnnnnnnnnnnnnnnnnnnnnnnnnnnnnnnnnnnnnnnnnnnnnnngatcatacttgtagcattaggcccagggatgagagtcaacatcattacaattaactatgtcaggataggagactcatcccttgcctatgagctgagtttagatgtgggccaccattttaactctggttgaatgtttatatatgaacacaggcctagcaccaatgtgatgtgagtctttggcctagacacttcaagcaggaggcaatgtgacatatctctgggtctatcaactatttgatatgaccttccttttttacctgagctttccccataaaagagatgtgacatatgtctagacccagcacctgggtgatgtggctcttctttattgactgagccctgtgtattttgggtattctgacatatccctgtacctaacttctggaagataagaagatccaacatgggccctgcctaaaaagtctcttgtgacaaatttctacatgaatcaccttggatatttgactcttctctcttacctgagctttgcccataagagagattgttacgtacctctgcagcaagcacctaaatgccgtgactcttctttcttgcctgggtcatgcccacagatgaaaggtggcttatcgctgtgtccagcacaccggttatgtgattatgctgcctgatctcttctcacaggagctgttgtgacaaatccctgggcccagaaattatttaatacgactctcctcaatgaccttaactttgtgcatgggataaattgtgacatacctctggatccagcaccgaggtgatgcgactctccttttctgcatgggctatgcttacaagaaggaggctgacttattgctgtgttgacaactgatgtgatacctctgttcttgtcttcctagattttaagaatttaaacaagagacacaaagaaaaaaagtacagcataatttattggaaaagaaaatatttgaaagttaagtgcagaatacagtacaccctgagagagatactccagggctgactgctcataagagtgagacagcgtggactgtcgctggagaaacccctttatggcagttttacattattattaataaggaggagggaagaggagttgctagtaaacatgttctctgtggtattctgggtgcatatgcgcagtagctgtacatgcttgttcatatgttgcatgtctcgttagcatcttatatttccacccaggagtgtatttctgtgtgtttgtttgtttgtttgtttgagacagagtctcgccgtgttgcccaagctggggtgcagtggtgtgatctctgctcactgcaacctctgcctcctgagttcaagccatgctcgtgcctctgcctcctgagtatctgggattacaggcatgcaccatcataccctgctaatttttgtatttttaatttagacggggtttctctatgttggccagtttagtctcgagcttctagtttgaagtgatccatcttcctcagcctcccaaagtgctgagagtagaggtataagccaccgtgcctggctagggggtgcattgtttgctattaaaataagcaaaatttaagtttgagggcaggtgaaatcaaaatacacatgctctctagaacagaaagtccttaatgaggatagctttgctcgaataagcccaattacaatgcgaatgctacggcttattgtgttggctgtacagtcaccatggtttctgtatcctgagatcatggtcattttctgtactatctattctgcctcaatttccccctaagagattttagggcaataaccatattggaggttgaggggttagaccactttttctggagctgtttcctgctgagtgggtgttacttctgcctagcctgggccttaaagtttcttcctgtgtgatctaacagggtgtaaaccatgtcattcgtggaaccagtgggaagatgttggcagccaaagattgaaagccttgcaaaccatcatgcaaacatggagctgccacaagcaacatagcaggaaatcagttaacattttaaacaaaattggaacaaaagtagaagttgaaaatataataatgacgggtactattaaagagagcaaggcaggcaatggacattgctttcatgttcccatggaagttcctagagattcaattttgtctgcctgggtgatgatattattaatattttcttggaataaaccagaatgattgatctcaaaaaacagcattcttcttttagatataaacatgttcctctttgcttggctgggagaagatcccaggctctttgattttgttggaatgcagtggccatggagtccagatgttgttgaagtctattgaggccctctgctgcctgttggggacacactgagattttctgagatagtttatactggattcccaaggctccaccttatggtgacatttgtgctgcaaaagtattctgctttaaaatggtgaaagcagcaaaagttttaagtcttttctatttttcgcaaataagaaaaagttttgtgcagctgagttggcagcagtcattgggtccatttatggatggtaaagttgaatggtggtcaaagttagagactggaaggcttcagtaaacgcgctgaagttgtctgagagccatcagagctgttgcttacattggattagatcatttactgggaagagaagaagcactctgatggtcctctctccatttgagactttctgtaagcggatcaaattctctggccctgcatggtgtgaagctccactgtgagtaactgcagctggactggtctctattgtaactggcaaaggctgatagaggagcataaggaggaggtgaaacaagcttagattctacagaagactctgatagtgtggggacgctggggattctaaagcaggtgtaggcctctgagggcccctatctggagctggtattaggctgtggggtctggggtcacttgtccataaaacaaatgatcttctactggatctgaggggctttgtggcttactaggctttagcccacaggtgctgcatggagctgggttttgttgtcgggccagaaagtcttgcacataggatacttcagaccattttccctgattactacagaaaagatctagctgtatgatggtgttaaatttcacagtctcattctccagccatgttttgtcagctaatctgtatgcaggctaaatagttttacaaaagaagataattgtttttttgcttcatttagccaaaagctgtttcaatttttaaatatacatcccaggtgtgtttcagtgacagtagaggaagtgattcccatggtgccgagagaatcctgcaaacgacagaacatgtactaaagtccaggaggctgtgggcagccccatgagccaagtggaaccaccaagttgtccaactcatccccttgaaaccccattaactgaagctctaggaggtcataggcatttgccatgcaccgtcctagctctcaccagcgctggacatctccagccctgccgagatgacccccactgctcgctggggggcagatgtctggctgacaagcctttccctaattcagtggtttgccatttatgatgcccaattataacacctgcaatgctcagattcaatccctatgactgggcctatccatgactgtgcatcttttgttcagcaaagaaagcctgttgaagaacaatttcaaggagctgggaaatgcataaagcctaaagggacagggtttccccagaactttagtgaaacagtgctggaagaaccagcgatagttaaccaggtagtctggaagtgccacagtattcacggcaagtaaagggaaagtgaaatcagtgaagcggacagacctctctccaggccatggcaaaagaaatgttgatggctgatgtaataccttgattcttattttcttagtttaaaagaattcaaacaagaaacacacagcaaaagaagtacagcatagagtaatttattgcacacaaaaaaagaaaagactactttgaaaattaagtgcagaatagacggtacattctgagaaagagattccagggcaggctgctcataagagtgagacaccattaattgttactggagaaaccctccttctgggggttttgcacgattattcataagaaggtggaaagaagtgttagtgtaagcatgttttgagtggtcttctgggtgcacatgtgcactaactgtacatatttgtgcatacattgcatgtctcattagcatcttaagtctccacctaggaatgtgtttttactattaaaatgagcaaaagttcagtttgaggacagataaaatcaaaatgcacatgttctctagaagtaaaagtccctactgaagatagcgggtttcaaacgaccccaagtgctccacatcttaaatgtcgctccaacaaagctggaacactatctgctcctgagggatccggtcccatttgtgtttctgagacactggcaagtcaggagtgacttgagatgagaccgatgatttcaagtgtaaaatgcctaaatagtcagcagcttcaggtttcattttggagcttgtccacttaaatgggttgatgaaaatggctcacaagactcatgcctcggaaatggggttttctcctttgctcttagcagattttgtgcaacccaataattaaccttcctgatgcctcaactttcacattcgtgaaaaaggcgccattgacagtgacatttccaggaagccacagaccttgtcaccccctacagaattctgaagctgttcataagcaggccacgtggaagatttctctcaaaagctgttgagcatgaggcttggctagagaaaaaagagggctgcggcacaatggacagtgtctcagacatcaggacagtttccacagcagtttaggaaagaaggcagcgccctgggctgcagaaggcgcaatgctctgggaagaaccctgggtgcagctgaaagaggaacttgagaaggatagggccaatcagttgaggacaacccgcccgatttgggcaaaggtaaggtgcctatgtagggtaataccctcctcaatgctcagcgcagacctgtcctctaggtccacctatgtactcattctccttggcaaagagtcggcatagcataagaactcagcagtgctttggacaccgggaagtccacaccgctctgcccctccctccagggctatgcaccccgggtcccggtacatgctgtgattatagttctgaagcctaccgacaaacaggctgagagcagttaacagactacagctcccagcatattaggtagggcgtgtaccactcggccccttcttccaggcctgtacctcgcccccgagactggcacatgctgggattgtagtcctgtagccctttgaccaaagggctgggagtgtttataagaatacatctcccagcaagccgagggagacgcacacagccccgcctctttctccactgacgggccgtgtccctgaccccagtgcataatgggatggtagtcctgcagccctgtgacacaagttctggtagtctttatgaaactacatctcccagcaagcagaaggaggcatccacatcctagacttttcctccagtaatgcgcactctccctgagccgggtgcatgctgggattgtagtcctgcagcccggtgatgagaggtctgggagtgtttatgagactgcaactcccaccaagcccagagaggcgtgcacaaccctgcctcttcctccagtgacgcgcacattccctgcgcccggtccatgctaggattgtagcgctgcagcccagtgaccaaagggctgggagtgtttatgagactgcatctcccagcaagaccagcgaggtgtgcagagcctcgcccctttctccactgattagcgcactctccctgatcccgatgtatgctgggattgtagtgatgcagcccagtgaccaaagggctgggagtgtttacgagaatacgtatcccaaaaagcatagcgagaacagcacaggtccacctcttcctacagtgacgcgcgttgtccctgagcaggatgcatgctgggattgtagtcctgaagccctgtgaccaaagggctgggagaaataaagagacaacatctcccagaaagcccagcaaggcgctcacacgcctttctcttcctccagtgaggcggactgccccggcgccccgtgcatgctggaattgtagtcctacagcgatgtgatgaaagggctggtagtgtttatgagactacctctcccagcaagcccagagaggtgcgcacagacctacctcttcctccagtgactagtgcactctccctgagccagagatatgctgaaattgtactgctgcagccctgcgaccaaacgactggggtagttatgagactgcatctccctgcaagcccagcgaggcacgcacagctccacgtcttcctccagtgatacacactgtccatgaacccgctgcatgctggcattgtagtcctgcagccctgtgaccaaagggccaagagaccacatctcccagaagacctagggagacgcacacagctccgcatcttttccccgtgtcgcatactgctttgatcccgatgcatcctgggattgtagtcctgtagccctgtgacaaaaggtctgagagtctttatgaaacaacatctcccagcaaacgcagcgaggtgcgcacaacctgcccctctttctgcagtgatgtggactctccctgagccccgtgcatgctgggattgtagtcttatagcactgtgaccatagggcagggagaggccatgggactacatctcccaggaagcccagcaaggcgcacactgccctgcctctttctccttagactagcgcactgtcactgagctgggtgcatgctaggattgtagtcctgcagccttatgaccaaagggatgggagtgtttatgagaatacatctcccagtacgcccaggaggtgcacacagccctgcctcttcctgcagtgattagcgcactatccctgagctgggtgcatgttgggattgcagtcctggatctctgtgaccaaagggctgggagcgttaatgagactacatctcccaaaaaatcacagctagaagcgcaaagccctccctcttcctccagtgacgcgcgctgtccctgagcccagtgcatgctggggctggaagtgtagtccttcaggcctgtgatgaaagggctgggaggttttatgagaatacaactcccagcaagcctggcgagtagcacacaaccccgcctcttcctccactgacgcacaatttccctgagcccggtgctggctgggattgtagtcttccgcctcttcctccagtgacaggcactgtctcttagccaggtgcatgctgggattgtagtcttcccgccctatgaccaaagggttgggtatgtttatgagaatacatatcccaccaagtccagcgaggcgtgcacaatcccgcctcattctgcagttacgcgcactatccttgatcttggtgcatactgggattgtagtcctgctgccctgtaatgaaaagtctgggtgtctttatgaaactacatctcccaggaagccaaaggaggcgcgcaaaactgtgtctcttcacccaggcacatgcactatccctgatcccggtgcatgatgggaatgtagtcctgcagccctgtgaccaaagggctgggagtgtttatgagacagcatctctcagcaagcaaagcaaggcctgcacagccccgccttttcctccagtgaggcgcactgttcattaaggagtgttcatgagattacattttccatcaagcccagcgagtcacgcacagctctacctcttcctctgccggcgcgcactgtctctgattccggtgtatgctggaattggggtgctgcagccctgtgaccaaagggctgggagtctttataagactacatctcccagcaagcacaagaggtgctcacagccgcacaccaccctccccgccccactcttctttcagtgaccgcgcactgtcccgtgaacctggtgcatgctggaattctcccgttgcgggattcaggaggatgagagagaccccgggttgaaacaggagaatttttattgagtgcactcagtgtcaggcctctgagcctaagctaagccatcgtaccttctgtgacctgcacgtacacatccagatggccggttcttgttttaactgatgacattccaccacaaaagaagtgaaaatggcctgttcctgccttaactgatgacattgtcttgtgaaattccttctcctggctcatcctggctcaaaagctccccgactgagtaccttgtgacccccccactcctgcccgccagagaacaatccccctttttcctttacctacccaaatcctataaaatggccccatccctatctacgtttgctgactctcttttcggactcagcctgcctgcacccaggtgattaaaagcttttattgcttacacgaagcctgtttggtggtctcttcacacggacccccatgaaactgaggacaagctaactcacatcaaaaagactgggcccggaacaaagacagaacctgacttttatgcacatttcacaaaaggtggtgggctagcttgaagcaagtttacagtggcgtgaaagcagggatacagaggcaggacagacaggattgcacatgaccgttgccaagcaacccacatgtccattttctaggtttccctgggcatgggcttatcctataaccctcactatggtgcccaaacagctgtagttcagcctactcaggcttctcatgacttacattgtacttcttagataaaacagaatacttgaagtcactagttacagagaacaagaatctataaactcattccgtaaaaaaaggaaatttgtttttcttttcccgatgttgggggagcgttgggagagcctccagagcacattagataatattatcaagactattcctggttctgggctgtgcctgttgaagcctctgggacaagtcagcccaatacaagaaaatttatttctctttctttttaattttatttttctttaatttccctcctcagtcccacagccctgtgaccaaaagactgggagtgtatgtcaggcctctgagaccaagccaagccatcgcatcccccgtgacttgcacgtatacgcccagatggcctgaagtaactgaagaatcacaaaataagtgaatatgccctgccccaccttaactgatgacattccaccataaaagaagtgtaaatggccggtccttgccttaactgatgacattatcttgtgagagtccttttcctggctcatcctggctcaaaaagcacccccactgagcatcttgcgacccccactcctgcccgccagagaacaaaccccctttgactgtaattttcctttacctacccaaatcctataaaacggctccacccttatctcccttcgctgactctcttttcggacgcagcccgcgtgcacccaggtgaaataaacagccatgttgctcacacacagcctgtttggtggtctcttcacacggacgcgcatgaaatgtacagttacgcttctgttcacttgtcatgagactgttttcttttacccccatgaacgtacttaccatagcttctttcaaatcttatctactgattacagcatcttgcacatcttgagaataggttctattgtctgctttttatcttgtgaatcgattacactttcatgcttcttcacacatctcatgaatttttaaattgtgtgataggaactacagggactctggattctgttgtatttctttgaaaattattattttaagagggagttaatttgaatagattcaaaccccaatccttatctcttccacagtggcatagataaaatcttcattcagtcttctaaacagtgtgcctttctatatagcaaaatatagtattttattaagctttattattgttatctgtgaaatagttattcaacgaactagtctacttcattattactggaaaccagaacctcagttgtgttcactttctggattttatataagtgaaattatataatatgtatacttttacatctactttcttctaggcaactttatatttatgatattaattcatgctattgcagatagctatagtttgtttatttaaaaaatattttttacattttggcaaagtatacataaaattaaccatcttaactattttaagtgttcagctcagagaaattaactacactcacattgttttgcaactattattcccattcataaggatcttttttcaacttccaaaccaaaattcaatacacattaaataacagctccctgttactccccctccagctcctaggaaccactcttctacgtgggtttccagaatttaactactctaagtatctcataagtggaatgatacagtatttgtccttttatgactggctcatgtcactttgcacaatgtccttaaggttcatgcatgacgtaccatgtgtcagaatttccttatttttcataactgaataatatcccactgtatgtataaatcacattttatctatttattcattgatgataattcaaacaacacaggtaattcaaaaaccttttgagtgatgtgagtcatgctgctatgagcttaggtgtacgtgtattattttgtgtcttcgctttcacatcttttgcaacataccaagatgtgaaattgctggatcatacggtgattttgagtgtaaattatttcgttactatggtgttgttttatagcagctgcagcattttacatttccaccaagtgtacaagggttctaactgctccacttcctcaccaacacttgtgattttctgttttttttttctttttgtactagttatgctgatgtgcattaagtgatatgtcatttggggttagattttcattttactaatgaaaatgaaaaggttttgttgagtaccttttcatgggcttataagccacttcacataatttttagagaaatatctgtttaagtattttgcccatattttaaacaagtagtttattattgctgaattgttctttgtatattctggatagagtcctctttatctatttttcttttgtttcttgcatttttggtgtcctgttaaaagaaatcactgcgaaatccagccttatgacgtgttttacctacattttatactaagaattttgtagttttagctcttacatttaggtctttgatccagttagttaattttttcttatagtagaagttaagggcccagcttcactcttttacatgtgggcacccaatttccccagcactaattgttgtaaaggcagttcatttcccataaaaatcatttgaccttatatatgagggtttatttatatgggccttctatattactccattagtctctttgtagcatgctattttggaattttgtagtaagtcttgaaatcattaagtgtgacttgtctaactttggtatttttttcaaaattatttttgcaatttaaagatctttgagattccccataaacttaaaaattgattttttaatatctacacaagagtaattggcattttacttcttcgttacttcctaactactttattcttttgatactattgtaaattgaattgttttcagagttttcttctcagattattcatgttactacataaaatgcagtttgtttttgtatgttgattttgtatgctactattcagctgaatttattagttgtaatattttttggtggaatcttaaagattttctacatataagaatatattttctgtacacattttgatgcagtttatttcattgtcttttttaatttctctgaatgaaacttctaatacagtgttgaataaaagtggctagcaagagcagatattcactctgtcttcggagcttagaggaaacacttttgatcttttcctctggaatatgttgtttgctgtgggtttttatatgtgaattttacaaagctggtttccttttattcctaatttattgtttttattataaaatattttgaattttgtaaaatacgttatctgtattaatgagagaatactttttaaaaagtttgtcaatgtggcatatgcattgattaattttcatatgcttaaacttttgttaagaaaggctagctaagtgaaccagtgagactggaaaaagaataaagaaatctatactggttgtgatcaattatttgtaaacaccactgcactgaaaccacccatatgctaaaacttcctttcattccaataataaactccccttggtcatgggttgtaatcttgctagtatgctgctgaatgtagttagctaggatgttgctgactagttttgcatccgtgttcataagggatattagtctatgggtttttgtagtatctttgtctggcttcggtatgagctaatggtggcttcatggaataagtttggaactgctctcttcaggcttttggtagactttggaaaggatttttgttctataaatgcttgatctaaatcactagtgaagccaacaaaataagggcttttctttatgaagaggcttttaattactgattccatttccttagtagttttgtatctattcagattttgtatttctttgtaatcaagtcttgtatacctaggaatctgcccactttatctacgttttccaatttatcatcctatcatagttcacagtacagttttttaaacattttaattctttgaattagtagtaatgtcccactttcatttctcattttagtatgtgaatatgctgttaattttttgtgtgtgtagctgaaagtttgccaattgttaattttttgaagaagtgagaatgaacttttggttttttggaattctgtggtttgtataatctccattgcatttatctctgctaaaagctttaatattttcttctttctctttgctttgcatctaatttggtgttatttttctaatttactaggtgataaagttattatttatttgaaatctttgttctttttaaatgcattttagctgcaaactttacatcttagcactctttttgctgtttcccttaacttttgatgtgttttgttttcatttttcttcctctgtaagtatgttccaacttcctctgtgatttcttcctttacttatttgttgtttaagggtatgttgtttaatttatacagttttgtaaactttctaacgtttcttctgttattgatttaatttgagatctactacacagcccatcgtggggaaatccccatgtgcatttgagaagagtgtgtagtctcttttgttggatggagtatattgtatatatctgttagatcaatttggttcattgagttattcaagaactctatttcctaatttatcatctatctcatttttctattcattactcagagtggagtattaacatcttcaactattattttagaactgcctttttgcccctttaattctgtcaagttatgctttctatatctcaatgttttattattaggtatgggtttaaactatttctatcttcctgccaaatggacaatctatgactatataatgtcttattgtctcttttaagtttttaagtctattttgtctgctattaatatagtcattcccagtctctttttcatactattggtataaaataattattttcttcctttttttttataaccctcaagtcctgtggaaggctaagagcagcattacttaatttaaaaagcagataaatcttaaatccatagtttaatatttctaaaagcatttaaatggaaatgagctacgcagtctaccaggaacgaaggatatcagttgggtctaagaataatcatgtcaaaaagctctaggaggaaaagctgctgggaattaagactgtgataacggtctttgggatcaagaaggaaatggggaattggggatgctcaaggtcaggtacatgcttagcaaaagacccagaaaaccctaagctctcacctctgcattttaaactctgcacaagtagaaagtagaggctcaaggagagatgtaactttatgctgattggtaaaggcatgctccaacacacatacatagatctcaggtgaaaaaatcagatatttatgtttagtgagagttaaaaaatctggagtcttactttccaattaaggtttagtgaaaatatttggggagatttgcattgatcaattcatcctgaggtcaagaaaatcttgattttggcatttggagcctctagtaaaggactagcctcctcccagaggtgttctttgggcttttggactcagtgacacactactggttacactgatttgaaagtcagctaagagcttgctgcagaactcctgacaaactcagtttcacccatagagggctagagcatccccagctggttgaaattttatgcctccttctatcctctgaagcaaagatgctgtctctgtggggcccccaatttactgagtgtttcctatatgactggtcctggttcatagatgagtcagggaaggtgaaacctcatgatgtccactgggctgctgtggctgtttaacctgtgccagccatacagaacctgacatgagtggttgctcctctcaaaggtcagaactcagggtttgggataatggcacatattctatctgtttggttatctacaatggaaactgtagactgtctgaatatcttttgggctgcaaactggagacaatctcagatgctgatctaactggatcactcatctagaagtccatggtaagggtttgttttctagagagtgacaacaatcaagctgcagattgaacctaaatctgtgtctaacgcagagtctaatactgcaaaccagacttggggttgctggtgaaagttgacctatttgtctcatggttgaagaattcctagaccataccaagcagagtaaccagaagtggacttttggcccacttcttgagatatcagtcaccactcttgacatcttcagcataacagtatgccgacaccatccataccatgtgtcccgtgaagctaatctgtgccatcttttaggcttttgagaccaattgagctctgacttcgcggcatttttcaccacacgtactaaaacaagccaactctatgatgttccctccttttccacacatgctggttagataatttgttgattaggtatggtttattttctcttcctgattgcctccaagataaggatgaaatgtttgggggatctaggaatcatctaggaatctatttcacaaacttggaatttcgtgctaataattcctgggtgaaatgtgactttctttcccataactgcaattctaggcaagcctggcttttgtatcctctgagttgcatctcagcctagtagcagttatgggactccaacttagttccagctaagttttatgtaaatattcttgtctctattttacctggctctagtagataaagtgtctagaaaaaagtagagggcgactagaataaagatgagattataggtaccggaatgagacacactgattctgtggaagtagtgggagaacaacctggaacctggggtatgaacaacacagacctcggaagctacgggaaacggtgggacattaacaactttttttctttctgaacaacccctggtgcagcccacagaaaggtctggaaatactattagttagatcagacggtaaggcagaggctgtggattcatctccttttggtccccacattactcttaagaatcctttgagactattctatctctccgtgatgtaggcatggaactctagtgggcagtgtgcactctcggtgcccatggttccaggccacagtttttcagatgatggacaacaattgctttttcctgaagagacttagtaccctgtggctgagcttaagcgggactctagacagcattgattgcattttcttcttcctctacgaactgggatttctccttctgtttttctactgcctagaggtgaatctgtatttgtcaatatttaggtaaatcagagacataaatcaggtaaggaaccctagacactgcttctaggctagctggactcttgcctatttcccttctcactttatgagatcaattatattggcacaggttgatacccttagatagtgtctctaaggagcaattagagaagcatacttctagagaagctggtaggacagggcaggagggccaatgaggatcaaagtttctgtccaaatttttgagcctaggtgtgtgtggccgacgaatccaggaaagatcccagatccctggaagggattgttaagagaggatccattagattagaatgctagggtgggtgttcatccgtcgccttctgagtgggattttcagggttaagactgaggtagggctgcagagaaatgctatcctgggaaagcctctgatcgagtgcaacataggtggctccagcacaaggagaagtcctctatttgaggaacattatacttgtgtggatgtgtctgtgctcttcctcagcagagccccactgactgaatgattgtttgagaattatgagtaaagagccctatattattttgaatttagtaaatattggaagagaaacaaacaatattatctactttcaaattgaataacagcatgagcaactttcaggaaaatgtcacaggaggaaactccagggccttgctcatccctggaaaccttgaaaatcctgatgcaacctgtagggttaaacttatcaatacttaattttttgccatatagatttatcttcataaaaaatattttcattggaccttcattttgatatatgccatgaagaataaatcatttatttcctttgtgataagaacatcacatttttacacctcatgtataaatgatgccatcacccatgtagtttttattgctatggcctgaatgtttatgtcccctttcaaattcatgtgtataattttaggcgtgaggcctttgggaaagtggtgaagccaagagttcttcatcttcatgaatggaatcagtgctctttcaaaggaagttgaagggaatgcccttgtcccatgtgcgagatggtaccatctatggggaatagggctctcaccatatacgaaatttgctgctgccttgatcttgcactttccagactccataactgtgaaaaatacatttctcttatttatcctttacccagtctaaggtattttggtatagcagccaagatgcactatgacactttcttagacactttggtttatttctgaatttttagtttcagtgatccatgagttttttaatcaatcaagattttacacagggcttgccagtggtttttttttttttcagagttttcttgtctattcttgtttgtgttttcatctatataacattttatagtaacgtgtacttgcaatatttaatggtatcagtataggaacaaaattgaatttataaataactataaggacaattgatgttgataatattgagtttttctgcctaagaatatgatacaaattgtctatttgcttatgtctacattcatatatttcataaactttctatgttttttccatattccgtagatatttttgtaatatttattcctagtttattctgctaaaaagtaatttgagacacaatgaaattgcaaagtgtttatttgagtaagagcaattgataaattataaaatatcagacggaaagatattgagtgcttcattgacagtgtaagaagcaagtatttatttgaaaaatgtagaaacaaagaaatcatttggtggtagcacaactttttttattgttttttgtttgtctgtttaccttgttggacagtttctatttatataaggttgttggctacttctgactggttgagcttcatttctcttttttcaatatgcagctacaagaaataatttaagttttgtttgtatttgcaaatcaagcgaggttgagatcacttatgagacctaactaattttgtctgctcagagattattgagacatgatctccattttaatttcctttaacaaattttctgtacttttactttccatccaaacagtaacttataaattattattgttgtacatatgtaggcccatgttgtgtatgctttgaagacctgtcctgcattcaaactcatttgtattatgttattattgaatttgccccatttattggaattataaactgcaatcccccaactacaagaggtatgagctctgatgagataagagtaaagatgaatcagaagtgaaaacagtcctccaacccacacatgcagtaaaaacaaatttcacatgaatacaatgagtaattatctaaaatttaaagtaccctgaaaacattaatgtttatctcattattatgtaatatggaaattacaaggcaaaaaaatccaaagacttactgtttaaatataattgaagttttttatatgatgaagtgctccataatttaaatgtaaaaagccaataggaaatatatgaaataaaataaaattatacgtaaaagtgacaatgcctctattagatttaacagtatcttacaatagaataagttgaaacctacaaaatggaagaaagtttaaaattaggcagatattatcagcctggtgaagaataaatacatatgtcaataagcatttaatgtattttgtcttagattttacatgaaataataaaaagtaagcaaaccaatagcatggtagtttcaccctgattgattcaaactgaaaaaatattaacatttctccatgagaagttggattcatggattggcctcatgctgcattcaaggcactttagccaggatccaacactcattgccaagagtcagcaggctagaagtttgcttttaagatgttccccggcctgcgaccaagacgctttttcctgactacttcttcaactctgacataggttttgctgatataaacgcaaacccggctctatacctaccaagtatctacttggctagagctgcaaatggagcatttaggcactaggcaagagctcttcccacgtttccaagcacactttctagaatttcccaaaactactgacattgtctttcagaccccatctcccaaagagaatcagagagatggtctggaagccatttagaatctccagcctccaacctagtaacaatggacttggatacaaagacgcaacctactgacctcaaagacaccagcccagattctgggcattgaattcctgcctccccatgaaagatctcaactgagtcacatcaaagcccacactcttcttcaaggttcaccttccagacacgctccaaaacagtccctcagaattgtcttgagatgaaacaaaaggtgatgaaggtccaggtttggaatgcctgcctcattcttcactcctgaaaagtctacacctgctggttagcactctcatatgttagggagcccgggctctgagtgcatcctttaacaggacctcctggccttttcctacttggagtagagtgcccaagaataatagggaatacaaggcctccactctcacatggcttgattgactgatgaactgatgtcggaggaggaaacatatgtagggaacagcctgggtcttgtgaatccgtttcccagctatgatgcctgtgcaaatggagggagaatcgtcaagtattattgggtggtagacagacactgcctaataaaattaagtaaatgtaaggtgacttgaaggggaatttatcatatgtcatatacaaaattttagttggtcaactttatttaaaaacagtcacaatttgtaagggcattcaaatataattttaatagggagctatgaaaattatctgcacttgctatgtaagtgattgagttaggggtaactatctgaaggtcatgagcttgatatctgctacttaatttcataagacatttacttgcaaatggttgccatttttgctctcactatatgaaaattttttcttgcaaagagcattcctatgaaagaaaaactagaaattttgccaatttcggctattaaaacgataaaactggtttgtttgttattcttaaccaaatgctcttacagatgacacatagtacccatgctttgattgttttttgtttttcttttcaccttaggtcaattgcctttcattttatttatcaaactgtatttactgtagatagacattgcagttctcatgtgccctatggatttgtactttcttagaagtatgaaaaaattctcaggctgagtatattggcttatgcctgtaatcccagcaatttgggaagccgaagcaggtggatcacctgaggacaggagttcaagactagcatggtcaacatggtgaaaccccatctctctactattcacagttcacattgtaccttgcaatgaatatacattttatccaaaaaggctaaaaaataatgaaattggggtggaaatggctggaagtataggtgaaacaaaaatgacacatgactagtagctgttaaatctgggtgactggtctgttatcctttttttgtattatgtatacgtttttaatgttctgtaataaaacacgtgtagaaaatgacaaagtttatctacacttagctcttaaggtcttggttacctttgggaaggagaaagtgtcaagggcatgagcaaatctgattcttacatacacaagtgtatttatttagtaataattcatcaagcattccataaatattttgttcctatattgctgtatgcatgttattcatcaataaatatttaaatagtacatatttgcataacaatcctaaattaatattttagaataatagtaatgttttgttttgttttaaagtggggcgtgttcactcaggacatcgtcaggtgtatattaatgttccaagatatttatttacgttttaacttttggaagagtcccctaggtcttttaatttttacctcagtacagtaagtagcatggttttaactttttggattgcagctttgttttcagaaaggttctccccgaagaatgatgctcaccccggccagcgcacacagcacagtgacccgtgcacaggatgcactgagcacacacggcactgggtgaaccatgaacagaaggacaagccagcctgggtctgcaaaatatactttgcaggaaaagcaggtaaaattgaaaggtcacaattcagcagcaaacgtttttacattcatttgagaaatcatttctaacaaaagctgctcgttaaagccatggttttctggcttgcctacacattgtaatcacctgcacaactttcaaccgtatttttttcagatccagctccaaggattctgatttagttgtgcggttacaacttgggtttaagggattttgatagttttcctccccgcaggtgactctcttgcgccaggggtaagaagcgctggataggggtgaggggtgctttagctgtgagagatagccatgtacgcttcaggatttgccccatcgcatatctggagttcggggtcttagaaaatattcttgccctgttaaaaattaaaggatggcttcaatacaaatttagctatttggctacgttgcagaaaaagaaaatgcctttccagagatcagttttttgagtcagagttttgttctgtcagtgaggctggagtgcagtggtgtgatcatggctcactgcagccttgacctcccaggctcaggtgatcctccagctccagccttctgagtagctgggactgaaggcatacaccaggcatggctaatttttcaattttgttgttgttgttgttgagatggctttctctatgctgcctgggctagtctcaaactccttgcctcaaatgatcctcccacatcagtctcccaaacagttcaacctacacgaacaggcaaccatgcctggtgtatttattaaaatgtagctactagaatatttaaaattcacatgtgcctcacatattatttcttagagaattgcctcatttttgaaatctcaggctgcctgctctaaaacctggatgtgccaggaaagtaaaacatctgaaattttaaaacaattgtcattatattgcttccatgtatgaataacacatatatatttttcataaatacaaataatcttacacacaaatgaaaatgcaagtattttacaggcagggccagtgtccagtgcatgaaggaagccctgccagaaaaggatccaggaaaaacttataattcttgctttattcaatccagtgtcaaatcacatatgtcactcatggcctgagggggcttggtggggaattgaactatatccaatcatgggtgctggagtggaaattatctaatcaggtgcacagctggagaagaatgggcagctttttggatctagggatgcctttgcctgtctctctactcagagctcaggacactagagccacctcaacgcaattgcctgttttttagttgttttaatgctccaaaagagaattagttttctcatgcattttccaaatgtgtggcaagaagagcctcaaatctaccaccctgttaccccagcctaactctggcttgctgtcagagtttaaatttccagttctttcctgacacttaccaacactaactaaccttgtgtaactcacaacattatcaactgttctttattgtacattttagacacagtattttaattctgcattttttcaaaaagcagtggatgacacttaaaaaaatatttttcatttgtaaacattttacaggacatgaaagcagataataatcccctgacaatccacagtaaaaaaaaagaaaagaaaagaaaagaaaatatttgtgcccctttctttaatcttcccttggcacagacaccccatcagaatgtttttgggttgaggtttcatttcagaaacctcacagggcaatacatcctcagccatcttgtgttattttcttggttttgggtttcaaaactgtttgagaatccccaagataccaacactggccatgactcttgaagtgtctagtaaataacatcccttgtgtcatctcctctcagggaacagcccaaggtatgggaatgcagcctctttttggagtggttggatgcactatacctggaaggaatctccacgtatacatttgcgctaaaagcaaaccctttaggacattaagaatttcttaccccaacgcttagtttccattccttagagacacattgcatgccaggcaactggatgctgaatagtgaggaaaaaatgtcctcagattggtgaagggagagaaaatatttcaaaggacaaagaaacccaacctagtgaggcagtgcaaaaacctgcaaagtaaaatgcacctcacagacacagtggagcagagcgtagcagctcctggtaggacgctcatgacccacatcactgaaccagatagaagcagggaaaatatcccaagtaatagaacggcttgacttgacccttgggtcagatatgtctgtgtttcaatcaccattgtcaccttctaattttgtcaccttgaaaatatgattgtatttattttaacttcactttttcattaactgtaaattatgttttatcagtagagcttcaaaggtatgagaatatttataaagcacattaagttggtgaattttgaataaaattaagtagtaatgtatttcatttgttaaaaattgttacttacctatttcctcagcagaatgagtgtagcatgtctcccaggtctgttttttatttgtttgagaggtgatttcaagcagaatctcacagcttactgttggaaatgctatcagttgtaaagatagggaaaatctctcttccactacggtggtaggaaatgaatacatatctgcaagcacatgaggtagattaattgtcaaattacataaatttatcacataagttattctttttttcaaaagagagaacttgtgaaagtgaataactctattccatatgctgccatctgggtgtttgagggtaatgttaagttttaggagctgggactttgcacctcctggaagtgttcacatatgattaattgtttactaaatgatttgttttgaacataattaaattacatgtttattttctgaaagggatagatactttggcttttcttgatgaattataagatataagccccttataatgtttttattttattttattctgttattttttagatgtagtttcactcttcttgcccaggctggagtgcaatggcaagacatctgctcactgtaacctccaactcctgggttcaagcgattctcctgcctcggcctcccgagtagctgggattacaggcatacaacaccacacctggataattttgtatttttagcagagacggggtttcttcatgttggtcaggctggtctcaaactcctgatctcaggtcatctgcccgcctaggcctcccaaaatgtagggattacaggcatgagtcaccatgcccggctgtaatttcctctcttttatatcttagatttgaataatttttgctggattcttcaaacatgaagtattttttgaattgaaaactaactgaatgactaactggtaaatagaagtcttagaccattgactaaaagctaaggcccaccttgaccctgcaaaagaggaccactgaaggcccagttgattattcctgggtgtctgccctgcaggtgtccaagcctactcacaccaaccatggaaggagcctttgtcactgccagaagatatagagccttggtaagctggaagttcacaggcagatgcagttgaggttgagatagaagaaatgttgggagattctttttagaatggaattgttattgtcctcagactgtttctagacttggtctaagaagttacctaagaagtattgcaacaaagaaaaagtacaaatgattagatctttgagtatctctaaggttaggtggaaaagggccttatttcatagggaggagaaaacaagtttacaaagaaggttggaaaggaagcacacgatggagggtagcaaaatgcgatcccagataagataatgtttcaccttgaactcagcctgttcttaggaggggtatgtataaataagggttgtaggtttgctgaagctgtgggtgagtcaaagttcaggggctggttggaagaagagaaacaagcaaagtttctttaagagtatgttatttggaccactgaagactaaattactgaatggttgttcatttttaaaaatgggaatttgcaatctgtgtccatttttgtgataggttaaaaaaacagcagggagcatcctcaaagtcatcaggggaagcacgtttctcttcactaagctgttctttgagaatgcaaagaatgggggaatttctttaaatatagctatttccaggattgccttcacccacaactgttccttgccctagacatctcttccatttggctgtttctgagttatatttttataataaagtagtaaatataattacagttatttgttgaggttttctttttagtaattctatcaaattatttaacttgaaaaggggtttatgctagtctcagatttataggaggtagctcagaagtgtagatgggcttcagggatgtgtaactctcctctacagtgagaggggtgatgtgggactgagccctgaatttctgggatctgtgtgaactctaagttgtgtcagaattaaattttggggcaacaaatgggtgttggagaagcagtgggttttcagggaactttacacatttaggatcaaaagtgttgtaaggagaaagacaatgtgggggcctctgctggagagagactccaggtgtctcggggaaggtaggctctgctctgcacacaggctgctacaccatgcactgccctgtggttccaggcattctcccatggtaagaaggaccgacgactctgagggaagaagttctgagaacagatgccttctaccctcctgccaacctgaggccaccacaggtttttcacccactgaacatacacactgcatgttgatgtggccaagcccctctcaggacaaggctttggcatcaagattgttgcccatgctacctttcctcatagactttcccaccaaaaacccacacatgtgcctacaagacccctggcatacgttctacctcagacaccgaatctgcaggggcaacctggttttttcaccatcccaggtttctgtgccacctgatcataatctcgtcttcctgcatggacacagaaataagtcagagtaaagtttcacctgggtcagtatctgtagcatgaaccagtccttccaccaaccctgtactgtctcccaactgtgggttcttaatagcaccttcccctcttttaccttttagttcacctcaaaccttttatttacgtgcacttagtgtgtccaagccacccctcagttgcctgaatccagcacctactaaaattcagatgtccagtagttcaagaccatgggcctagaccatgtttttgcagaaggaaatacatattagaaatgagaggctctattctcccatttgaaaattaaaaaagatattttttcttttcccttttcttaaacaatgtaatttagagaactttttttagtaattttttgaaatggaatcttactcttttgcttagtctgaagtgcaatggcataatcatagctcactataaccttaacttcttgggtttgagcagtcctcctgcctcaacctcttaattacctaggactataggcatgcacctccaggcctagctaactttttatttatttatttatttatttatttatttatttatttatttattttttcaagacagtgtcttgctctgtgggccaggctagagtgtagtggcatgatcttagctcaatgcaacctccgcctcccaagttcaagcaattctcttgcttcaaccttttgagtagctggcattacaggcgcacagcaccatgcctggctaattttttattgttattatttttaggagagaaagggtttcaccattttggccaggctggtctcgaacccctgacctcattatccacctgcctccgactcccaaagtgctggtattacaagcgtgaaccaccatgtccagccatatttattttatttatttttttatggtgacagaatttcaccatgttgcctgtactggactcaaacatttggcttcaagagatcctcctgccttggcctccccaaatgttgggattacaggcatgaacagccgtgcctggcctggaaaacttttatatgtatctttttttctctgcttctttgaaatataagcaaatcattttaacagctaaataagccttttgccactcttcatgacacagaattgtctttgtctaagacctggaaactattgttttgttttttaatttggcaaagatttattgattttttattttcagtcttttgaagtaggcacagctcagtacagtggctcatgtttttaatcccagtgctttgggaggctgagatgagagaattgcttgggcccaggagtttgagaccagcctgggcagcctaatgagtctccttctttataaaaaattaaaatcaactagcagggcatggtggcacaggaggctgaggtgagagaatcatttgagcccaagagtttgaagctgcaatgagccatgatcacagcactctaccacagtactccagcttgggtaacagacggagacctgtctctaaataaataagtaaataaaaaaaagtgtttttccatacataaaaataagtaaataaacagataaataaaatagacatggatttgctgagaataaagctaattacaagataacagaaaagtgagaaccaaagatggggttcaccctagcaaatgattccagcctattagaacactcagaattttccctgcagcatgaccgacatgaaagtagaatgtcatcatgtcaggctgtaccagcgtcgggagactaaacactgtggggaagaacctcccttatggaatattatcaacaggtgagagcccagctcctgccctgatgggctacagaaatgagttcctgagataacacattgcagaaacatgcatagagtagtttaaccttttttgtgtgtaaccctttctccattttcctgcgaaatcctccctagtaatagtgttagcttttaagttttgagggtccgataggactgaagctgcatgctgcaggagatacgtggggccggaaactaacacaaactgcagccacaggcataaatactcatggcctaatgtaaagtgaaaactatacaaaattctttaccgttattcgcacaagtgtgtgaagagagactttccacataaccaacttgccactgagactagtgaaggccagattccactggaacaaggctatgagttactcatgggaaggccgtaggacaaagcccagagatttttcatatttgagtctgggtcctgtttctttccctgtcttctcagctttctgtctgtagagacccctatgtggctgctctcagcacagcccagtgctggctgtgtttgctggtttagtgcacctgctctttttccaaaaagagggaggagttggccacattaaactgaatgatgaagctcctcatcaatctgaatgcagctttgtaaatgtgcctagaaaccacgcaaagaaaagtctgtgttcttccttgctttgaccgtatgtgacacctccattagaaattctgcttttctctgcactccagcctgggtaacagagtgagacttcatgataaataaaaaagaaagagagagagaaggaaagaaagaaagagagagatggaaagaaagaaagagaaagaaaaaaaaaagaaagaagaaagaaagaaagagaaagaaaagaaaagagaaaagaagaaaggaaaaaagaaaagaagaaaggaaaaaagaaaaaagaaaataaaagaaattcttctcttcagattaggcacataaggagaatctgtataaatctccatgaaggaaggaaaccagaggacaagttaaagtcttggaattcacatctgagtacacagactcgttctccaaccctcttctttttattctgccagctatggcctaggtatgaacatgacaggtacacaagagttccaacacccgacaatctacttcagtccaagaagagtgccctccctcttgctccccatccaactcatggtactaagaagtggtgtgggactgcccagatgagttgacaagagaggctggcgtggaggggcctgtcctgggctgccctgtgttatttgtaggtgcacccggccaaaagccagggacatcagtgatgagggctcagttgacatctgtgttatcagataagacttttacattgagcctttgtaaggctgaaactcagaaatttcagggcacaatgaaagagcatctcactctcttgagcaactctcacaaacagaggtggatacagagctgtctcaagaatgtggattcctggtttcttaactgctgttgggttctgacaccaagaaagtatgttaaactcttcaaggttccatctactgggccccatgtttctgtaagacataccgaaaggccccactatgctactgattgctcagtctcctcttccatgtcaactctttatttgtacacaattatgcaaacacaacttccccttaattccctggaaagacctaaatgcaacctgggttccaggatagaagagacagctggaacataaccttgtttttcttaccatctctgggacccagtaaaagtcactgtattcaaggcttccccagcctcctaacatgcacactggtgatgatgctaacatctacttcctagggaatgtattaggtgtatataagataagacataaaaataatgatgtagtgtcacctgtagataatgcatacacttagagatggaagcattaggagaataggtgggaggtagcatgggccacaactcaaacaggcctggtgtctgccagggtgatcttggaaatatcacttctccactgggcctcattttcattctgctccagtatgaagttgaaattaaatgtagatactgtcctctggcattcatatagtttagctgtgcgtccccacccaaaactcattgtgtattataacccctaggtgttaagggaaaacctgaggggagatgattggattatggggacgggttctcctcatgctgttcttgtgatagtgagttctcacgagatctgatagtttcataagcatctggtacatcccatgctctcactcacttcacttgtcagccactgtaattggaaggtttctgaggtgcccccacaattatgtggaaatgtgagtcaattaaacttctttactttataagttacccagtctcaggtactccatcattgcagtatgagaatgatctaatacaggaattcaactttctagtgctttctctttatatttagaatcatatccatgtgccttatcacgtctatgacagaggaagtcttcacaaagtctcccagtactaggtattgagtgactcagttttttattgaataaaatggaatacttcctgatgccagtactatggcccttcggttttgaggaaaatatcatcttgtatgttggctaacaaggagataggagttcaaatcaaatttgttttgtcatactggctttaaggcagtgattagaaaaggcctaataggtgggttctgtaggggattgctggaaggaaagtaggaatatggaaagtcatgagacatatacagtcatctcttcttgtttcctcacaggtcacatacaaattcagggagagttagtatgaagcacacaatggaaatttgggctccaaagtctgcaaagtgatgcttcatggacttcagttggcaatattggttccaacaatttcagccaatgtttaaaaaacttatagcagttaaatttttagtgtttcaacaagccgtttcctatctttcattctgaagatccattttttaagtctttttttttaacagtatagggggtacaaattcagcttctctccaatgaaacacagaaaaggatatcacttttgtattagttcaggctgctatgccaaagaaccatagataggcagcatatagacaacaggacttaatttctcatacctccagaggttcaaatttgagatcagggtgtcagcatggttgagatctggtgatgactggcttctgaatttcagcctgcacacttcaggttttaccctcattttgcaggaggatgagagccctctgcggtttcttgtataaagccagtaatctgtattatgagggtcccaccctaagggtttaattacattctacctccttatagcattacgcccggggttacaattttaacacaaatatagaagaaaaattatagtaactctcaagttttttttctttctttctttctttctttttttttttttttttttttttttttgagacacagtttcactcttgtatcccaggctggagtgcagtggtgtgatctcggcttattggaacctttgcctcccaggttcaattgattctcctgcctcagtctcccaagtagctgggattacaggcatgcgccaccacatctagctcattttgtatttttagaagagacggtggtttcaccatgttgtccaggttggtttcaaacccttgacctcaggcgatccacacgtctcagcatcccaaagtgctgggattacaggtgtgagccaccgcaccctgtcaagatgtttttaaagctctaatttttctcctactgggtttttctcgtttgcgccctcgatctttctgtctctttttgtgtaaacctttttgtctaattctgtctattgtattcctcaaacacaggaagcaagctccaatgctatgagatgctccatgtagagacccacataacaaagggtgagagggtgctcagacgagtagagagaaggaaagtcaggctctccagccacactaaaccctgtcaattttcacatgagtcagcttaaaggctcatgctttcccagtccagcttcagttaagaccacagcccccagtctcataaaagacctgaaggcagaggtagccagctgagctgtgtccagattctggtccacacacattatgagatattatatgttgttgaaaagtgctgacttttagggcaatgttgtcagaaaggagcagatatctaacctcatctcccaggccctaggattctccatccctctgcttatctctttctcaggctgtctgcagccaaactagtccctttttacctctgccaaactcacacctatgagttttttcactaagggtggcttctccctgacacatgcttgtgcagatgcctccctgctgtcatcctcatcatggattaaaagtcacctcagtgaggcctgaggtcctcccatgcaataattttccaggttttcttctcaataatctactttatattatagtccttgctcttttctttcacatatacttgctttagtgcttttgtccagcggtcctcagattgtttggtcctgggttggggggtgcagacatgaagtaataattttctgtaccacatgttggacccaccagggtcgctggcaaatggtgagcgcaagggaaaaaagactggctaagtgattatatgggggatccctaatatcccttccccttttgaccacctgataatgtggacatcactgataacaacatgaggtgtgtgactgttacttgttccagctgctccagcaaagctcagtgggcaccagaaacacagtaggctgtaaccacctcctggccatcactaaccctacagccccaagcaggagcactactgaacaaatctgataccttgatttttctgtcctcaagacactggttcttcaaggtcctaggggataaagtagcaggatctgaaggccccaagtataatgagtgaactaggaatcccgttttgccctctctttgcctccacctttttggttgtgctatttactcatgaggtatcctccccttatccagtgaaattattttctaccactttcaaatgaggaccttaagaacgcaacagtagctgagattttccgtggacctcagcctcagagtccagtgctctggcacatttaactctgtctcatcttcatctacccaagatgcctctcaagtggccatgcctccctctgatttgaaggatctgcagagtgggtgcatttttgcagtctcagagcaagaatccaggctggcagacacttatgagtatgtgaaatcatcaaggtcacccacttcaggcacccctatttatgaggaagaaaacaagctttcctgtaggcactgtctacattaggctgaggtggagcatagctcattttacttccagttgccctcagagctggatgcagaaccccagtcctgttatcttgaaactgacatggagaggaccccatgtgaacagaaccctgaatctgctcattttctgtgctcctgaatgtgtagctacagactctaatttcgaaaacaaacctgataagtgggacggtgccaaggcctaggaagctggagccctctctaatgctctggagcctgcccacctcctgagatctggaccagtctctgcctcttctggggcctcagtttcccaattgtaatgtaatgagaaattaaatgtaaaactgcataaacatatgctctgtgagaatttggtgtcagagttctcaatactggatgataatttggagtggggtgggtttgggacccatgggttctcaggcctcctttcacacccagtgcagtaggtgtagagctctggacagccaggtgttctttcctgagccagctgattacaacacaatggaccaagggctctgatcttaaatatggtttcacaggataccccaccttcagccaccacctgctctgtgcttcccatattttggggagctgatgacaaaccccattatagtgaagaagaacaagaaactagacttgtgggcctggggaaaagaaaaaaacacttctatttctcccaaactgtagaatctcttgtcaaatatttaattttgattatatctgagcttgataatacattcatgtgttaacagctgcttaaatttattttttctgtgaagtgtgggataatgtctttgccgtattttaaatcaaattctaaaagctctctttagagtggataagtgagcatctttgtaatataaacttcacatatttgttgccagtttgttctttttgtttttgttaaaatgttttgttttattctgatttggatgtcttttggcgttttgctttgtggctatttattatgacagtgtaacttctcctctaattgactgacggtttgtacattctcaataaaatattttcataaaatctttgtaaaaattgtgtagtcaattttacattacataaacataaaacagtaaagactatcacgatgaaaaaggaagattgagggcttaaaaagtaaaatacgacacagctaaagtagtctgaaagggaaatttacagcactaaatccccacaagagaaagcagaaaaatgtctaaaatcgacaccgtaacatcacaattaaaaaaactagggaagcaagagcaaacaaattcaaaaactagcagaagacaagatttaagatcagagcagaactgaaggagatagagacacaaaaagcccgtccaaaaaatcaatgaatccaggagctggtttttttaaaagatcaagaaaataaataaacttctagccagactaataaggaagaaaagaatcaaatacatgcaataggaaatgataaaggggatataaccgttgatcccacagaaataaaaagtatcattacagaatattataaatacctctttgcaaattaactagaaaatctagatgaaatggataaattcctggacacatataccctcccaagtgcaaaccagtaggaagtcgaatccttgaataggccaataacaagttctaaaattgaggcagtaattagtagcctaccaacaaaaagaagtccaggaccagacggattcacagccgaattctaccaaaggtacaaagaggagctggtaccattccttctgaaattatttcaaacaatagaaaaagaggtactcctccctaattcattttatgtggccagcatcatcctgaaaccaaaacctggcaaagacacaccagaaaaagaaaatttcaggcccatatccctgatgaatatcgatgcgaaaatcctcaataaaatactggcaaaccgaatccagcagcacatcaaaaagcttatccaccacgatctagtcagcttaatccctgggatacaaagctggttcaacatatgcaaatcaataaataaaatccatcacataaacagaactaatgacaaaaaccacatgattatctcaatagatgcaaaaaaggccttcaataaaattccacacctcttcatggtaaaaactctcaatgaattatgtattgatggaacctatctcaacataataagagttatttatgacaaatgcacagctaatatcatactgaatgggcaaaaactggaagcattccctttgaaaacctgcacaagacaagaacaccctttctccccactcctattcattatagtattggaagttctggcaatcagcaaaagaaagaaagaaataaagcgtattcagataggaagagaagaagtcaaattgtctttgtttgcagatgacatgattgtatatctagaaaaccctaccatctcagcccaaaatttccttaaactgataagcaacttcagcaaagtctcaggatacaaaatcaatgttcaaaaatcacaagcattcctatacgcaataataggcaaacagagagccaaatcatgtgttaactctcattcacaattgctacaaagggaataaaatacctaggaatccaacttaaaaatgatgtaaaggaccacttcaaggagaactacaaaccactgctcaaggaaatgaaagaggacacaaacaaacgaaaacaatccatgctcatggataggaagaatcaatattatgaaaatggccatattgcccaaagtaatttataaattcattgctatccccatcaagctcccattgactttcttcacagaattagaaaaaaaactacttcaaatttcatatggaatcaaaaaaggtcttgcatagacaagacaatactaagcaaaaagaacaaaggtggaggcatcatgctagctgtcttcaaactatactaaaaggccacagtaaccaagacaggatggtactcgtaccaaaacagatatattgacaaatggaacagaacagaggcctcagaaataacactcaacatctagaatcatctgatctttgatgaacctgacaaaaacaagtaatggggaaaggattccctatttaataaatggtgttggaaaactagctagccatatgcaaaaaactgaaactggacttcttccttactcgttatacaaaacataactgaagatggattaaagacttaaacataagacttaaaaccataaaaaccccagaagaaaaccaaggcagtaccattcaggacataggcatgggcaaagacttcatgactacaacaccaaaaacaatggcaacaaaagccaaaattgacaaacgagatataattaaactaaagagcttctgcacaacaaaaaaaactatatcagagtgaacaggcaacctaaagaatgggagaaaatttctgcaatctatccgtctgacaatgggctgatatgtagaatctacaaagaacttaaacaaatttacaagaaaaaaagaaacaacaacatcgaaaatgggcaaaggatttgaacagacacttctcaaaaggagacatttatgcagccaataaacaaatgaagaaaaggacatcatcactggttattagacacatgcaaatcaaaaacacaatgagaaaccatcccacacctgttagaatggtgatcattaaaaaaatcaggaaacaacaaaggatgtggaaaaataggaagacttatacactgttggtgagagtgtaaattagttcaaccagtgtggaagacagtgtggtgattcctcaaggatccacaatgagaaataccatttgacccagcaatcacattactgggtatatacccaaaggattataaattattctattataaagatacatgcatacgtatgtttattatggcactgttcacaagagcaaaaactttgaaacaaaccaaatgaccatcaatgatagactgaataaagaaaacttggcatgtccacatcatggaatacgatgcagtcataaaaaggatgagttcatgtcctttgcagggacatggatgaagctggaaaccaccattctcagcaaactaacacaagagtagaaaagctaacatcgcatgttctcactcataatagggagttaaacaaagagaacacacggacacaggaaggggaacatcacacactggagcctgtcgggaagtgggggactatgggagggatagcattagaagaaatattcctggcctaggccactattgcgattttctaaattttgtttcaaaaacatgatatgtttcaaaaattgttattggtatgtaattatataaatatatagttcagaaaaaagaatcaacattaattatgctttttccaaaatactttatggttttgagctcttctagcagtgacatttttgctgtaggtaattgctgtgtatctggtatattcatcatagcatactttgtgccgtttacacttatccttcaatttcccactctcctaagtgtaaaagttcaaggccagagctcccatatcttcccaatattactttttgaaaagaagcttctatgtactgttttctctgggtcttgattggatatattgctaaaagagctgaaaaataataatttttttaaaaattcggtgatgagattaaagtaaatatattttataaatctaatgtacaaaatgaggtcagctgagaagacaatgacagttgaagcagaacctgagatcctgtttctctccattgacatatgaacttaactacaattgggcgaacaaagccagttgagtttgtagcaccccacatgagaaaaaagccaaccataaccacatttagaagaaaatttggtcacatttgtgcactacagaacagcgcagttagataaaaatctgtccattccatgattctcctttgggaaagaaaaaagagtgaaatgcgtatgcaaacttctgacttactgagttataccggggttatctaaagactggaaattgcttcctttaacatttagtgttgatgagaatagagactgagtttaaatgacagcttgggtcaactgagaataaagataaatgcttcttacaacaacagagactgtagtgcctacaacagtgacgaagggaagagactaaaggctcctaagaggaaacagaggtaaaccttattaacaagaaaatacatacagtagtccaaagaagacacattttgacaacagattggagaagctcccagtatgactactgtggctgaatgttgtcaattttcccatgtataaagctctttcataaaggataaaataggtagtggtttcttaattgatcaaaaccttaacaaaactacagtaagtaaaagcaaccaggaaatataacctaatcaaaggagaaaaatatatattcaagtgaacctaaagaagtggagatctaggaattatttttttaacttaaaatctttttatttttctttactttttcattttatgcagaggatcttactttatctcctgggacagagtacactggtggaatcacagctcactgtaacctcaaatttcggaagtcaagcagtcatgccacctatgtctcctgagtaaatatgaccacagttgtgcacattacccctcctgtatagtttctttaaaaaaatttgtacaaacagtatgttgctgtgttgcctcggctggtctcaaactcctggtctcaggcaatccgactgcttcagtctgaaagtgctggcacaagctaccatacctggaattgtttctcttttaagaaaaaatagctttaaatcattaatagtaaaataaaacaaagaaaggtattgcgtaacgataaagggttcaattcaacaagaagacttaactatcgtaaatgtagatgcacccaactttggggaacatagagttatacaacaattactgctagaactacaataagcctcaagtagacacacaataatagtaggggaatgcaactccccactaagtgtttgacagattatctaggcagaaacttaacaaagaaattctggagtttgattcgacacttgatcaattgaaactaatagacatttatagtatatgcaacacatcatctaaagaaagtaaattcttctcatctgctcacagaatatgacaggccacaatggaacaaagataaaaatcaataccaagaaaatctcacaaaatcacagaatgatattgaaattaaacaacttgctcctgaatgaattttggataaacaaaaaaattaaggcagaaaattaaaaagattttgaaatagaagagacacaatataacaaaatgtctgggttgtaggaagagctctgttaagaggaaagttgagagtgctaaatacctgcatcaagaagttagaatgatctcaaactaacaatttaacatcacacttagagaaactagaaaaataaaaactaacttaccccaaagctagcagaatggcaaaaatattcataacctatgaacctgacaaaatctaatactcagaatctataagaaacttaaagaattcacaaggaaaaaattaccccatgaaaaagtgggcaataacagacactcttcaaaagaacacatacaagtggccaaataacatgaaaaaagcttatcatcactaaccatcaaggaaatgtaaataaaaaccacaataagacaccattgtacaccagttagaatggtttttgttaaaaagtaaaatgataatagatgttgatggggttttagagggaaaaaaccacttatacactgttaataggaatgtaaattagttcagccactgtggagaacagcttggagattttccaaataactgagagttaaactgtgattcaacccagcaatttcaccgctgggtatatacccaaaagagaataaactattctaccaaaatagcacatgcacttgttggttcatcactacactattcataagaggaaggacctgaatcaacctacgtgcctattcatggtaattttttatttttttgagatgacgtctcactctgttgcccaggctggagtgcagtggcacgatctcagctcactacaatctccacctcccaggttcaagcaattctccttcctcagccacccgagtagctgggactataggcgcatgccaccaagcctggctaacttttgtatttccagtacatacggggtttcattacgttgtccaggatggtctcgatctcctgacctcatgatccacccgccttggcctcccacagcactgggattacaggcatcagccaccatgtccagcctattgatggtaaattgaatttaaaaagtgtcacatgtacagcaatactacttagcaaaaacaaacaaaaaaaacctcctttgcagcaacgttaacacaactaaaggccattatacaaagcaaattaatgcagaaatggaaaatgaaaatactgcatattctcacttataaatggaaattaacactgggtacacatggacagaaaaacaaaaataatagacaactcttagagggtggagagagggagggaccaagaactgaaaaactgtctacttagtactatgctcactacctgattgatggaattactcatacttcaaacctcagcattatacaaaatacccatgtaaaaaacctgtgtaggtacctcctaaatctaaaataaatttgaaattctaaaaagaggtcttactctctcacccagacaggaatacaatacgatgattatagctcaatgcagcctcaagttcctggggaactcaaggaataatcttacgtcagcctccaacttcctgagactacaggaacattccacaatgcctgagtaatctgtgaaaatattttttaccaatagcttgtcacaatattgcccggggtagtgtcgaactcctggatttaagtaattgacagggtttggctctgtgtccccaatcaaatctcatcttaaattgtaataatccccacatgtcctgggagggaccctgtgggaggtaatatttttatcaaaatatcaatgacattttttcacagaaatagaaaaaatattttaaatttatgtggatccacaaaaaactctgaatagacaaataactttgagcaaaataagcaaagctaaaggcatcactttatcaaacttcaaaacttgctacaaagctatagtaaccaaaagagcactgtactggcataaaaacaaacacatagactaatgtgcccaagaagcccagaagttagtttatgcacctaaagccaactgattgtcaacaaaattgccaagaacacactttagggaaaagctaatttcttcaataaatgatgcagggccatttaaatatttaaattcagaaaaattatactagacccctgtgccttgccatatatgaaaatcaattcaaactaaagacttaaatgtaatgctatcaattatgaaactattagagaaaaactaaaaaatgctttataacattcgacggggaaaggattattaaaataacatgtcaaaacataggcaacaaaatcaaaaataagcaaacaacattatgtcaaactaaaatgcttttccatattaaaaaaactaaaagattgaagagacagcttaggcaataaaagaaaatgctttcaggctatacatatgacaaaaggctaatattcagaataaataagaaactttaaaatctcaaaataaaatacacttataatctaattaaaaaaatgcaaaagatcttaatagatgtttgtcaaaaagtgatacaaaaatggctaactggaacataaaaatatgttctacattactaatcactaaggaaatgaaaatccaaaccacaatgaggtaccgcctcactcccatttagaatggctataataaaaataaataaataaataaaacaagtactaatgaggatataaaatgagtgaatgtatacattgttggtggaattgtaaattagtatggccactatagaaaatactatggaggtttctgaaagaaattaaaaatagatgtattacatgatccagcaattttactcctgcatgtatatacaaaagaaaggatatcactgtgtcaaaaagatatttgcatttccatgttagttacagaactagttataatagcttatatatggaatcaattcaaatgtacagcaacagataaatggataaggaaaatgtactatatatgcacagtgaaatactattcagctataagaaaggataaaattctgtcagttaaaagagcatggatgaaccttgagcataccatgttaagtaaaataagccacatagagaaacacaaatactttatgatcttattatctcactcatttgaggaacctgaaaaaaagggttgatataagcaaagagtacaacaggggttcccagagactgaagcagggagatgggaaaaggcagcttcaaaagtattgtgttacaattagataggagaaataagtttttgttttttgttacacagcagaataataataattaatgaaaagttatctcaaattacaaaatagctaaaagagaccagttgtggtggcacattcctgccatccatacattttgggagaatgaggtaggagaatcacttgatgtcagaagttcaagatgagcctggacaacatagtgtgaccctgtctctatgaaaaattaaaacattatccaggcatggaggcaggttcctgtagtctcagctaattgggaagctgaggttagaagattgtttgaggttacagtgagctaggattgcaccactgcactccaatctgtgtgttagagcaagatcctgtctctaaaaaaagttaatatataaagatataaaaaaatagctagagaagaagcttttgaatgttctcaccacaaaaataacaaatgtatgaggcaataattacactaagtactctgatttttattgctatacaacatatatacataattgtttccccaaaatttgtacaattacatgtgtcaattttaaaatatgaagactataatgtaaaatctatagctgtaaaattcctagcacaatacagaagggtgaagcttcatgacaattggtctcggcaataatttgggggatgtaacatcaacgaatcagacaacaaaagcaagggaatacacatggtactaaatcagtgtgtgaaaaatatcccaaacaggcaaagcagaacatggaatagatatatgcacatttatgtacactgtagcattactcacaaacatactacctggaagcaaatgtacctttaaggatgagtagattcaacaaacagggcacgtatattcactggatagcattcagccttaaaaataaggaaatcttgaaaagtactacaataaggacaaatctcgaaaacattctgttaagtaaaacaagacagtcaaaaaggaaaactgtataattacacctatgtaaaatatttagtcaaactcaaagaaaccaagtgttgtagtctcagcagtgcaccaagatgtaacagtctctcatagtctgagatagcatcgaaagttctttgttctacttctagggagattaaggagcgtgaacacaaaggtgaggttagagtgaaagtttgataagcaagagaagaaagctctttgccagcagagatagtttctgaatggggtgacctctgtgaggctggggcccaaggtttttatggactgggaaaggaagagaaggaaatgtgcctagttaacaggctgtcttgaaaaaagtgtggctcagcttggcccaggactttgacccgggaccaatcaggagctgaagggatgattcatagatgctatttagattggcccaggacttatcagaagctaaagtgaaagcttggcgcaggagcttgtcccgggagcaatcaggggctgaagtaattattcacagaggtctgacttacagtccaaataaaggagagtgtcgaccggaatgcaccagagcccactgtgcttatgcccacaaaaggagaagaaacattttcctgggagcccactgactgcacaaagtacaaaggcgtttctttttttctttttcttttctttctttctttcatttttgtttttgagatgtactttcttattatttattaatttatttattttgagacgtagttttgctcttgttgcccaggctggagtgcaatggtgcgatctcggcccacagcaaactccgccacctgggtttaagtgattctcctgcctcagcctcccaagtagctgggattacaggcatgaggcaccatgcccggctaattttgtatttttctccatgttggtcatgctggtctcgaactcccgacctcaggtgatccgcccacttctgcctcccaaattgctggaattacgggcatgagccactgtgcctggacaaacaaaggcatttctatgccaggtcggtcttgttcccttatctcagtgagctggaggtttgtacaagtttttatccaaatatgccagaggtttttctgtctgtgcagccatgggcaggtctccaagcacaacaccatgtgctagttaccttgttagtgtctgcagcttgattttttccaggattccttttatattatgcagggatgagacactgacccaagggccagggactttccagggacccttctcttgctatctaactaaagcaagctaactaacttgtttcagaattaatgagtattcacttttacttttgtaagacaaaaattatctaaaacctattgcaaaaaaaaatagaactatacttaccacttctaaaccatatacttaaaatgttagaaatgaaaatggcatgtttttaactacaattagaaatttaggactacctaaaaggcacggttacaaaatcttcaaacatccccttcaaataacaaagggttcttctcacttaattatttagatttaaactataagttgattgtaaatttaagattatttccctgactactcaccaagatagaataaaataatcactagaaaccaagaaaagagggaaatttatagcactaatgtccacatcaaaaagctagaaagggccggtcatggtggctcatgcctgtaattccagcactttgggaggctggggtaggcagatcacttgagaccaggtgttcaggaccagcctggccaacagcaaaaccatatctctacaaaaaaatacaaaaattagctaggtgtggtgattcacatctgtaatcccagctactcaggaggctgagacagcagaagtgacttaaaaccgagaagtggaggttgcagtgagccgagattatgccactgtactccagcctgggtgacagagtgaaactctcccacaagaaaaaaaaaaattagaaagatctaaagttaacagcctaacatcttggttaaaagaacaagaaaaccaagtgaaaacaaacctgaaagctagcagaagataagaaatagccaagatcagagtagagctgaaggagatagagacactgagaactcttccaaaaaaaaaaaaaaaaaactcaaccaatccaggagctgtttttatgaaaaaaaaaaaatttataaactagatggaacactagttaggcaaataaataagaaaagaaagaaccaaacacaaatagaaataataagggagatatcatcactgatcccatggaaataagaacaacgatcagagaatactataaacacctctatgctcataaaccagaaaatctagaagaaatggacaatttccttgcaaaataaactctctacaagactgaaccctgaatagatcaataatgtgttctgaaattgagacagtaagaactagcctaccaagcaagctgaatttgacttgaggtaaagaggagatagtacattttctcctaaaactatccaaaaaaaattgaagacaaagaagttctgtctaactcattctatcaggccagcatcatcctgataccaaaacctaacatagatacaacaacaacaacaacaacacatcatgccaatgtctttgatgaacactgtgcaaacatcctcaataaaatactggcaaaccaaacccagcagcacattaaaaagtgcatccaccacaatggaattggctttgtctccaggatgcaaggttgattcaacatatgcaaatcaacaaatgtgactcatcacataaagaaaactaaataaaaaaaccacatgattacctcaatagatgcagaaaaagcacccaataaaattcaacattccttcacgtttaaaattctcaataaattaggaactgaagaaacatacctcaaaataagaagagccatatacaacaaacccacagccaatatcatactgaatatgcaaaagctggaaacattccccctgaaaaccggcacaagaaaagtatgctctctctcaccactcgcattacaactcccattcggaaaacttgtccaggaaaatcaggccagaggaagaaataaacagtattcaaatagaaagagagaaagtcaaattatctttgtttacagatgacctgaccctatatctagaaagcctcttcgtctcagccccaaagcttcttaaggtgataagcagcagtagcaaaatctcaggatataaaatcaatctgcaaaagtagctagcattcccatacacaagcaacaggcaagcagggagacaaatcatgaatgaactttcattcacatttgctataaagagaaaaaaataccaaggaatacagctaagaaggaaagtgaaggatatcttcaaggagaactacaaacaactactcagaggaatcagagtggacacaaaacaaatggagaaacattccatgctcacggagagaaagaatcagtaccacgaatatgagcatattgccctaagtaatttatagattcaatgctgttcccattgaactactgacattcttcagataattagaaaaaaaaaactttttaaaattaaaatggaaccaaaaaagagcccaaatagccaagccaaccttaagaaaaaaaaaaaaaaaagctgaaagggtcattgcctaacttcaaactgtactagaagagtacagtaacaaaaacagcatggtactggtatagaaacagacacatagacaaatgaaacaaaatagagagcatagaaataaagccaaaaacctacaacaaactgatctttgacaaagtcaacaaaaacaaggaattagggaaaagtctccctattcaataaatagtgctaggataactggctagtcatgtgcagagaattaagactggaacccttcctaacaccatagacaaaaattgactcaagatggattaaagacttgaatgtaaaacccaaaactataaaaaccttagaagaaaaaatctagaaaataccattcaggatatagtcatgaggaaagatttgatgacaaaaagaccaaaagaaatagcaacaaaagcaaaaattgactaatggggtctaattaaactaaagagattccacagagccaaagaagctatcatcagagcagagaagctagagaatgggagaaaaattttgcaacctattcatctgacaaatatctaatacccagaatctatgagggacttaaaatttacaagagaaaaacaaacaaccccattaaaaagtggtcaaaggacatgaacagacatatctcaaaagaagacatacatgtgcccaacaaacatggaaagctcaacatcactgataactggataaatacacatcaaaacaacaatgagataccatctcacaccaattacaatgtctattaataaaaagtaaaaaagaaataaaaacagatgctggtgaggttgtggagaaaagggaacacttttacactgttggtgggattgtaaattatttcaagcattgtggaagagagtgtggagattcctcaaagacctagaagcagaaataccatttgacccagcaatactattactgggcatacacccaaaggaatataaatctattttaaataaacatgtatacatatgttcattgcagcaatatttacaatagcaacgtcatgtaatcaatctacatgcccatcaatgatatactggataaagaaaatgtggtacacatacaccatggaacactatgaagccataaaatgtaatgagatgatgtcctttgcagggacatggttggaatttgaagccattactcccagcaaactaatgcaggaacagaaaaccaaacaccacctattattattctaacttattagcagaagcagatcaatgagaacacatggacacatcaggaagaacaacacacactggacacctgtttcatggcatgggggaggggaaggagagcagcaggaagaatagctgcggatgctgggcttagtacctgggtgatgagatgatctgtgcagtaaagcacaatggcacacgtttatctatgtaagagacctgcatatcctgcacatggacccctaaacttaaaataaaagttgaaaaaaaagcttatcacatatggaccactgaacttaaaataaaacttgaaaaaacatgagtatgaggtggattccctaggttagacccaaactgaagatcctgaagctcctgctgggggatttggggctgggggcaccctggggagctgctgccaaggccatccaccgtccctacaggccgcctctcttcccggcctgtgatggaaaggagaaggggtatgtgaacagctgtggaagtcagactctcgggaactgaatcaggccccagcccatgccccccagcccagtccagccaacgtgcccgctgtcttcccacccagccagccgagccctcaggattgttagatggaaccaggctccatcaccacccaggcatggagggaagatgccctggtccttagcaagcaaggcctggtttccaaagtgctctccgaagaggcctcatgtttgtgacatcttagaaggtacctttctgctgttcttgcacccagcatgttggcaagtcaagttcccccactgagttctccacacataaggagggagtcaacaccattgctaagtcggatcagctcaagtgtctccagtatcagttttatcagatcccagggacctgcctgctcccagaggtgacagagaaaaatcaaggaacgatctgtatggtcactgacatggatgaaacccttgtgcatagctccattaagccaatcagcaatgctgactgcctagtgactgtaaagattgaggggaccatgaggccttatatggatgagttcctgagatgactggaggaactgtttaaatgtgttttcttcattgctctcttcattccagactgaacaagtatgcagatcctgttgagaggtgacagcgtgctggcagtcctcacaacccttgctcactctccgggcctcctctgcctgggctccaactttggcggcactttaggagcccttcagcctgtcgctgcactgtgggagcccctttctgggctggccaaggtcggagccggctccctcagcttgcgacgaggtgtggagggagaggtgcgtgtgggaaccagggcggcgtgcagtgcttgaaggccagcgcgagctcggcggaccccacactcggagccgccggctggccccaccggccccaggcagtgaggggcttaacacctcggccagcagctgctgtgctcaatttgtcgctgggccttagctgccatcccacagggcagggcttgggtcctgcagcccgccatgcctgagcctcccccccatcggtgggctcctgtgtgcccaagcctcctggatgagtgtcgccccctgctccacggcacccagtcccatcaaccacccaagggctgagaagtgcgggtgcacagtgccagactggcaggcagctacacctgcagaccctgtgggggatccactgggtgaagccagctgggctcctgagtctggtagggacgtggagaaactttgtgtctagctcagggattgtaaatacaccaatcggcactctgtatctagctcaaggtttgtaaacatgccaatcagcaccctgtgtctagctcagggtttgtgaatgcaccaatcaacactctgtatctagctacactggtggggatgtggagaacctttgtgtctagctcagggattgtaaacacaccaatcagcgccctgtgaaaaaagaccactcggctctaacaatcagcaagatgtgggtggggccagataagggaataaaagtaggctgccccagccagcagtggcaacccactcgggtccccttccacactgtggaagctttgttcttttgctctttgcaataaatattgctgctgctcactctttgggtccacaatgcctttatgagctgtaacactcactgtgaaggtccacaacttcactcctgaagccagcgagaccacgaacccacctggaggaatgaacaactccagatgtgccaccttaagagctgtaacactcaccgcgaacgtctgcagcttcactcctgagccagcgagaccacgagcccaccagagggaagaaactctcaacacatccgaatgtcagaaggaacaaactccagacatgccacctttaagaactgtaacactcaccgtgagggtctgtggcttcattcttgaagtcagtgagaacaagaacccaccaattccagacacattgtgatgggtgtgctggaccagtgtgaggtgttctggggttgcctagcccatgagtcacgtttgttccaccagggctgctatgtcaatgacctcagccatctggggagggacctgaggaaaactctcatcctggacaactcgcctgcttcttacgtcttccacacagagaatgcagtgcctgtgcagtcctggtttgataacattccagacagcagctgctgcacctgatatcagtctttgaggacatgagtggagcagagggcatctatactagccttgggcagcagtgggcccttagcctttcctgcttcccagcaatggccatcacagtaggggattttcccacactgtgcctttatgatcagcctgaaagaatgaagcctggaacacctacccacatgggcctggaaacagtgagaagtgattgaaaagagctttaggacagcttagattcccagtgggtgaatgccagaccaaggatacccagagctacctgccatcaagtttttgggttcccaagattgggtgtgagagaaagaaagagagcatgtgtgttttgtgatgaactgtgggcccaatatatagtgtttcagtaggggagaagctgaaggacagagactcttcccaagttagctttgtctcctctcctgtcaccctatgagaccctgagttccatagggatgaagactgttgaaggctccattgcaaacctggtctttcttcagtgctgcaaggcctatgccaaggagaaaggaaaagtatgtctttgggtgttccagacacacatctttctgaaatatttctccagccagttgttgcagacaaaagatgatatttctgggaagatggggacttatgtccagaccagtacccaaaccatcaggtcttgtggcctaaaggctatgcttacttaagtccagccaagtgcctgggatggatcctttctgcatctcctcaagactcaccacttaggcatagcctcaaacctgtggggaaggaagttgtctccccaccctgcaagaggacaaataactgatttctcttctttcgactctgttttaaaattctcttaaaaaaaaaaaaagcctatctgaaactgaaaagaaaaaaacaaaaaaacaaggaaaaagatgtcatacttacataagtgaaaaacatacagatatatctataagcaacaaacacagctaattcacacatatattaaacatcacattgagataaagtgtaccgagctaaaaattatctttcaactgatgatatcaagctttaaaataaaaatacatttaactgatctgagaaaacataactcccaagaaaagaaacacaataacacggacttgaaaataagaagagagattttcgtgcataaaatcctgaatacaacatagatttacaatggaaaataaccgtttttttttttatttttttttttgagacagagtcttgccctgttgcccaggctggagtgcagtggcgcgatctcggctcactgcaaactctgtccactgagttcacgccattctcctgcctcagcctcctgagtagctggggatacaggcgcctgccactatgcccggctaattttttgtatatttagtagagacggggtttcaccatgttagtcagggttgtctcgatctcctgacctcgtgatccacccgccttggcctcccaaggtgctgggaatacaggcatgagccaccacaaccggccgaaaaataattctttagatatctacagcattcaactgtgtgcactcatgaaaagcagacaatttaagtcattagaatttaataaattgcagtaaaattatacagaaaatacattacaatcattaataacaggctctaatgagaggaatttaataaataatcattaaaaatacaggataattttattatgttctcaatatgttgctgcacttcttaccacaaaacataataaaattatatgactataatatagatttcaagagctaaaaaagccttatatttccaaataaaagaacaacataaattttgcaaaatatgacgagcattactgcagtataaagtaaatatctggaattaaaatataccatcatttagatacagactaaaaaaaagaatataaatgttaatgattcctttctgcctgcagtgagcttaaaattacaaccaaaaattttaataaatatgtagcacctacaagacattttattaatagcttacataatgtggaaatttgagcaatttattttagaatttttgaatctaaaaatcaccagcttgacattcatttgagaaagtgaaacataaaggagagtaacataagcaagacgacagaatgggaggttcggcatgcacatcccccacaacataatgcagctgccacgggaaacataagtgcattcatgaaagccttagaatccagttcagagtttgtgacacccagctggaggcaaagaccaaggaagacatctttagagggtaagcacttgaccaagtggcaagcttgccaatcatggtcctcggttcaaaacagaatactaccacatcttactgtaaacttggctatgactcatttgaacttggtcctgccactgcaaaaatctgtgaaaaacacaaaagaattcatactcatctgagacttaggtgacaggcctgcagaacttggttctctctatagtccctgaatcaggcaaaacacaccttctttccttctccagccaaggtctggaagaaatcttcacattgatatgatgaaatgctaactaacaatatgaaaaatactaaagtataaatgtcactaaaaatggtaaatacatactgaaattcagaatactctaaattgttatcatcttaaactagactattaaaatacaagaggttttacataagtctcatgataaccactgggggaaaaaaaaacatagtaaagaaaaagagaaagtaattaaagcatacacaaacaacaaaaattacacattggatacagtggctcctgcttataattccaacacttttggaggccaaggtggaagaatcataagctccttgggtgttgtggtacatgtccaagtagtccaagctacttgggtggctaaggggggaggattgcttgagcccaggagattgaggctacagtgagctgtgatatgccactgaacttcagtctgagcaagaaagcataactttgtctcaacaaaaatgaacaataccacaggaaagacagaaccagaaaaaaaagaagcaaacttaaaatggacagaaaactacaaatgtacaatagtaactgcttacctatcactaccttacaaataaaaagattaaattatctactaaacagatacttctgtagactgaatgtcatctccaaaatttaggataaaatggccaatgtgaaagaattaagaggtggaacctttaaaaattaattaagctataagcactctgccctcatgaatggattaatgttcttattatgggaatgggctaattttaacaagaatggatctgttatatattaaaaaaaaaaaagctgtctctccctcacatctttggccatgttattatccagcaactagaccttcaacagataccagtaacatgttcttttaccttcccagcctccagaatcatgagtcaaataaaattctgttctttattaattaccagtctgtgatattctgttataacagccaaaagagactaaagcagacagagtggataaatgaaacttttaaacctcgtaatatgctgcttacaagagactcaattatgaattaagagcataggctaaaagtgaaaggatagaaaatgatattccatgcaaataatagccaaaggagttcaatggtagttatgcttaaattagacaaaatagactttctagcaatgtctctcacaagcatgaaatgagtttaccatacaataataatagaggttaatttgtcaagtgaatatagctatatatatttatgcacccaaaagggaggcttctaaatataaaaagcaaatatgggcagaactgtagggagaagtagaaagaaatccaataatagaaaactttaatgaaatgtataataaaggacaaatagttaacagcattgtgaatttgcaagggaaagctgttctcctgtgttgcatttgagaatgcagcaaagaaagtgggaactgataattttaccacaagcctgagttaggctgaaaaacagggtggtcgattagaggttccacttgccatatattaaaaaaacacaggagaaaaccagtcctcctctggagtgttaaaataattaaagagcagaaaattagactaaagtggctctagtgtcctgggttcataggttaaaaaaaaaaaaacaaaaactaaaacctaactcaaatacatttcctataaagcattatcttagcctgaaacaaaatgcacgtttaaccaatggcaaacatgcaattaacctctgaatatgtaaccaggacatttccatctggatagttcaaataaggtgactacataactggaaccaatttttgaatttgggctgctttctcatgcatcttatgaaagcctttcctttatgcccctctggtggaccagaaatcatggctgggtgctttccatttcaccaatcactgtttgttcagataaactggttaacgttttaacatagactcccgttaatttttaacaagagagactggggaccccacgggccgcagctcctcccacgcaaacacccagtggcagtttttccctgatgacccaccaggcctccctgaacaatctgggaaatactcatggctgtgggcgcagagcagggcgctgcccagggacagcaccggatgggccaggccggatgtgggggtcctcgatgctggcccagcggccatcttgcagccacaggggactgagggccaagctgcgggagactcggagctaaccgtgggggccggtcctgccggtttcacagcctgctgtcccctctcgggatgccgaaccccgtatactcaccatttcccagcttccaggatgtcctgtcatcttaactgtgcgtccccaaggacctacagatcacagggcaacaggggctgtgaaagagtagcccggggctcccaaagcggaggaggcgaaagaggagacggatcccaagttcctgtgccagcgccagcaagagacaaagacccgccaaacgccagaagccacgccctcctctcctgtcctctccaactgcgcgcctgattgggctgttcccacatcagtgtcaatgactggataaaactccaggactcacccacccccgcctgactcctgcccctacccccactccccctcagccttagtgcatttttgttagtttgttttactttaagttctggaatacatgtgcagaacgtgcaggtttgttacataggtttacatgtgccatggtggtttgctgcttctatcaacctgacgtctaggatttaagccccatatgcattaggtatttgtcctaattttctccctccccttgacctcaacaccctaacaggccccagtgtgtgatgttttgttcccggtgtccatgtgttctcattgttcaactcccacatatgagtgagaacatatggtgttctgtttcctgttcccgtgttagtttgctgaagagaatggtttccagtgtcattcacgtccctgcaaaggacatgaactcattctttttatggctgaatattatttcatggtgtatatgtgccacattttctttttccagtctatcaatgatgggcattaggttggttccaagtctttgttattgtaaacagtgctgcaatagatatatgagtgcatgtgtctttatgctagaatgatttatattcctttgggtatataaccagtaatgagattgctgggtcaaatggtatttctggttctagatacttagggaatcaccacactgtcttccataatggttgaagtaatttacactcccgcccccagcagtgtaaaagcgtttctatttctccatagcctcatcagcatctgttgttcctgacattttaataactgccattccaaatggtgtgagatggtatcccattgtggttttgatttgcatttctctaatcatcagtgatgatgagcttttttctttttcctttttgtgtgtttgttgaccacataaatgtcttcttcttcttcttcttcttcttcttcttcttcttcttcttcttcttcttcttcttcttcttcttcttcctcttcttcttctccttcttccttttctttttatttattttatttattattattttaaagacggagtctagctctgtcacccaggctggagtgcagtggcaggatctcagctcactgcaacatctgccacccaggttcaagtgattctcctgccttatcctcccaagaagctggaatcacagccacccgccaaaacaccatgctaattttttgtgtttttagtagagacatggtttcaccatgttgcccaggctagtcttgaacacctgacctcatgatccacctgcctccatggctgaaagtgctgggattacaggcttgatcaaccacgcccagccaaatgtcttcttttgagaatagtctgttcatattctttactcactttttgatgttttttttttgtgtgtgtgtgaaattaagttccttgtagattctggatattagacctctgacacatggatagattgcaaaaattttctgtcattctgtaggttgcctggtcactctgatgatagattcttttgctgtgcagaagctcgttagtttaattagatctcatttgtcaattttagcttttgttgtgattgcttttggtattttattcctgaagtctttgctcatgcctatgtcctgaatggtattgcctaggttttcttctagggtttttgtggtttggtgttttatatttaagactttaatccatcttgagataatgtttgtataagatgtaaagaaggggtccagtttctgttttctgaatgtggctagccagttctttcagcaccatttggtaagtagtaaatctttctccattgcttgtttttgtcaggtttgttagagatcagatggttgtagatgtgtgatgttattactgaggcctctgttctgttccattggtctatatatctgttttggtattagtactgtgctgttttggttactgcagccttgtagtatagtttgaagtcgggtagcaagatgccccaagctttggtgtttttgcttaggattgttttgggttgacaggcacacaggctcgtatagttggggtcacctgcccagagtatcacagctaattaagaagtgagctgagacttgaaatgcacatgctccttcccttacctgggtctgttgtataatgcatcttagcagctatttaacagtaggaattagaacatttggacatctttttaacaactttttaacctgcattttgataatgcaggaaagaccttcatcccgtccctgagcccctctctcaccacgctacatcccactgctgaccacattgtagggtagccattaggaatcaggcgggcagtgggggctgggaataaataagcaaggattatgctgcccaaatttgctcatcttagaaagtctcctcaaccattctgtgtgaagtgattattccagggtaattgtggcctgactgcgctgcatgtcagtctgacttgtctttttgaaaatcactggattactctcatgaacgggggtatttctctttctatttgaaaacggccaactgtcctctgcaggtgtcctgatttgctagtttagaccctgaaggtagcggtgagaaaatatttgggccacaacagaatacctattctcagctggaagatatatagaaatttcttaataatatctaaccattttctcaataaccattatatttaacattgatagcttggagggcagggaaggacacagatgacacaatcttcaaagtttatttataagtttttttttttttgttcttgtttagttttgcttagtttttggatacaaggtcttgttctggtgcccagggtggagggcagtggcataatgataactcataatttggttgtaacggttctttaaaatatatttttgctgagagtgctagctcacacctgtaatctaaacactttgggtggtcaaggtgggattatcgtttgatcccaggagtgcaagacgagtctgagcaacataagtaggctcagtctctagaaaaatatttaaaaattgtctgggtgtagctttgcatgcctgtagtcccagctacttgagaggctgatttgaaagcatcactggagcctaagaatttgaagatgcagtgacccatgattcagccactgcattgacagagtgagatatgtgtgtgtgtgtctgtgtgtgtgtataaagaatttgtatgtgaaaaaaattcaagcacaggataaaagtgaaagcccatggtgggggatgtggagaaaggtcagtgtggctccagcaactcagtgagacttggttttccatcttgaagaattgcccatccacactgacaccatagcctaacatatgccagttctcacactacacctgctgggataccagtatgtagccttttgaaaaaaataaaatctttcacctaagagaaggacaagagaaaacgagggtttcacatctaaagccttcattttctttatgaatcaacagccacttgtcatttcaattgtccagaggcgactgacagcaccaatacacttaatgaatcaaccaggaaaaatgggcctctcaggtgaggaggaggcacaatggtcacaaaacccaatccgttctcagctttgcatggtgctcgcatctcaagaagtggtgttagccatgtgaaccgtgttcactggacaaggccagaggaaagaatatttagtacaacacaactatggggctgcaaatcaaactggtagtgagagcatgcatgaggcttcagtggccgagacactggtggctacccttcggtgtcacttaaacctttgaggtgaaggacgtttattttccccaattggctcagagaaactaatcaacattaatattgagatttgtttttcttttcaaaatttctaagacacagaggactctaacactccaaaagacattcagatattcttgcagctgaggacttgactgctctgtagagggatggcagagcagcagccaccagctttaagagctttaagctcctcctcttatagggaaaggccacccccacacaacccccctaacttcataggctctggctgttaggtgcacctgggggactgtcttcctcccatctcattagctctccaagacagttcagctcaatctaaaacctaccctaagatggcggtatgtagactctcctccattctcccagcgcagtgtgacttctggagagtgctcccccatcgtcttacctcaaatgatgtgaaaagagctggttcccgggtagttagatgttcagtgacctaacaggcccagcatgcgcagggcctggccccacagcctggcacctctctcctacctggccttcacttcgaccttttctcttctgtcaccaatgtcaggtgatggtcaccagtgccacactctcatgagcttggtaagtagcaggggtgtaaaccccaacagatttcctgtgactctaccctcttacctcccactcaagtgacattataagcataattttatatttgatctaatttatgcataacctttttataacatttctgacaacagcccacacaaccacatgagtctgggttacagaacacacgggcgaggctcgggtagcaggtttcacttactttattccaatgtgaaatgaagattgatgatttaaaaacaagacaaagttgtttatcagctgtggggtggctacacttgctagctcatgctcacttcctttgaaacaaggtatctggacagaccatattcataagtaagacttcgcaaaacctcagacagaagttccagtcagacacagctccctcaggctcacagggtggcaaccgcctccatgttaggctctgacagcaggcaaggaaaggagcacaggcagcaggggacagggagggtccgggactgtagggatccccaaatgccccagagctattctctgtagaagggcacacgcaggtctcactgtgtcagtgcagtggctgaatcatgggtcactgcagcctcaatctcttaggctccagtgatgctttcacctcagcctctcaagtagctgtatggcaaaaagcctcctactttttacttaaaacctggactttaagccaggttgggcctgggaatagtggcagcaaaagcagcagccaaatgtatacacttcagatgtctacactcatgggcacaggcatattccacacttgctggaacacgagacgcctgagaggcacctgtttcccagctactaactgatgtccacacaccccattcacgtgtcttcatttaggtctctgcatcgtatatttgctcagccagtgcaaacacatcttctagggggcaacattaattgcagcacctgccccacttgttctgggagggagtcaagaggaatctggtcagctcctaatcccccaggacaaaggtgatgcccccttttcaggacttacatccagcagcgtcatctcgggatgggtttttcaaacacaagcagcatgaggtagcaagcatggtgtgacaggctcagggccatgggcagccggcttctggagaagcagcacagggcaggcacatctgtgggtggcaccatgacaagccaagacagcctcagcccctaatcccaacagctccagcccagatggcattcaaatcttcccggataatatgggggtgcccgatgcccatcactcgccctctcattagcacggccttgttggttactcagggactaaggagagggggtgggggatgtagatccagggtgggcactgcctcacagccagagtccacctgactgcaggccagcaagcaagcccaagcagctcagctctagtcacctctggctgcactttttatgtgtaatttacacaaaggcagcaaaaggaggtcaacattagctgttgtgacatgaaagtctatgcctcattaagaccttaaaatgctattgtcttaagctctctttactctaataaaatttatacaaataaacacatacaaggtgaactactataaaggaaatattaggattttttaaacccataaacagacatgaaaacagtcactgtttgattgcagagaaagtgagcttctaaagcacctgaccacaaaacagcctcaccaaaccccaggcaggccaggcagtctgaacactacaaggccacgtgatggtcacagaggatgacagctcccatgagtattgcaaggcactgtgttagcttctcactcacagtctcagaataccctgtgaggggaggccccgtctcactagagcacaggaggttcctgagctcttcccagaaaatggtcatcaaacgatggagcagggggaagcccagacagaacaagtgagtccctagggtctccttaacctccctcagctcctccacatgggttcctgagggaaagtgagcagtctcctaacccctttgttagggttccagtcctgcaggtctggactctctcattttatgctaccataggggatgacaatgcaaccccaggctccttttttgccatccctcaatgccaggccaggcccagagccatttgctgacacagcccaggggatgctcaaggcccacctcggcacagtcacctgtagtgtactgagatgagcaaggaggtgcaagtagacacaaatccccatgggcttggcctcagctatgttccacaggctcagggcctcgcagaagagctcacagccctccttcaggaagcctgcagatcacaccctcagggagcagtgctcagatgagcaggcaggccccacatcccccaccccatgacgctctgttccactttgcaggcttctgcattggccagtccccactgctttctggtgagatgtccgagttgaagtgagtgttgaatgccacacagctgatggagctcactgccttgcacatgttgtaaaacacctcctggttacaagggtcagctgtggagacacagcttgatgggaggtaggcccactccaccatcagtagtgctgggttgccctgatctgcaccttccagatacttgctgagatatctgcatgcttctctaagggactgggtcacgagacacccctggcaaggaccagctggcagaacaggctggacactctccttcagcctccccagcagccctacctgtgctgtcatctgtgctgatgatctccgtggtaagattatgggaaacttttacagcaagttttcctttctcacttccctatcttaataacagcactgataacttttaagccctagaaagctggaactgcaagacacatgatcttctgccttagaaggtccatgtttgggcagtgtgtgcccaggtgagagccccatggttgttagtggaagccgggagctggatgggcctggccccatagcctagtgaaaagtgggaccctctccttccagagcatggaagtctcagaggctggaaaaaggtgcctgagtggcctgccaaaaagcataaggctagaagggctggaaggaaccccaacagtcttcaaggtgcctgagagggctgggctcattccagctttctttgctttcatcctgatagcaagaaaacctgctcacacatggcaggcgggcctgaggctaccattccctcatcaggggctataggcactttaatgtggctctttcttgaagcagctgctcaggccggttctcgaagagaagttccctcattatccacaggttcttgttccagccccgtgtctgcagagggactagggagggagaaaatctctcagcctgtgccccacaacctgctctgagatatctcttttgttacttcctcacggacagcatcaaacttccaaatgaacagaccagcatggagcctccagaaaagtgcacagaattctgtctagtacccagatggaagggggttcccagtgagggcagggccaggctgcatgcacctcttcaggaatgttctcctcattgtccaacttcaaggtgtgcatcctctgtgtgtatgcagtccatggcaggctctgcctggggaaccgtccagctgaacacctgcaatgtggtggtgaccctcttgaatgagtggttgtgggccccatggcagtcatcagagagggagatgcttagcccaccaagccgagagccctgccacagccttctgtgaggcctccatctgctctgggttcttgccctgaaaggctgtcctgaagtcaaacagaagaaggtgggcctctcttccagggctgctctttatcccactgacagctccctagagggcgactaagacagcggggacagattcctcaggcagaaggactggagtttaggctgacgggttcattccatacccccacatgagatgacacaaggcaggggctgtgggacaaaggcattgcctttccttctgggatgaggaatggcataggagacagggtatggtggggctggggttgagcgatgggcttcactgagtaagtgtcctggttatctgtccacagacccagaacaagtggcatcccaggagcctgggaggggctggcagagacttactggttccagcaaaagcccatgtggatgcagcaatgctgcctgctggtccttggctgtaattacaaacaggtacttgaggtccccatgcatcttgcagctctcagagagtgtgttccagctgctcatggtaggcacttttagtcactgaacgtgcttcaggaatggccaagcttgattaagccaggcgtcttgctgtgagaccctccacccaactgaggaccctcttccttgttccccctggcagtttcaccttccagttctggttctagagacacgatggcccctcttgggcccctgggagaatgtgctcaggtgacacactgtcgacagggcccatttccaagccattcttccatttcccactgtttgaggggctgaggccggtgatcagcacagggccacccagggccagctgtctgcacctaaacatcatgctggtctggatgtctcagggccagaactctccaggtgagatggcctggtcctcagcacctggcctccgtgctcctttttcctctgttcaatcctggccccaatgcctcccgcaactctcaggtcaccattggagaagatgctcaggaagaacaagaagctgcagtcaaccctgctgaaggtggcatatgggtccaggctcttgagctggtcttcgacatggtacatgtggatgcaggctttgagcagtgtgagtagctctttccggaaggaggggaaaacggtgtttccagggtcctacaccctagaacgacccatctagcacagaaaacagtttgcaacgtgctatcatgtgtgattttaattttcaactttaggctttcattttcaatttccacaataaacacataaggtggggttctgatttcaacacacacacattctctctctctccctctctcttagaatcttccagtgcgttcacactgaaagccaaagtcctcccagaatcttgtgagaacctaaatgatctgaatagtttgtcattgattttggggatctgggaaaatctctgcacatttctggagaccgctgttatgccaattttaataaatctgttgtgcttcaattcagaagtgtgtgaagggagttgtggaggaattggcatttgggttagaaattccaggaacaccagagacagatgacacctgttttctgcttcataatgtcaagttttacgatggctaaaacctaattctacaagaaaattagactgaaaaactttataggcaaaaattatcttattaaataggaaaatctaagtattttattttaaaatttcctttttcttagtaggacctaatcatagaaatgtaaactctatatgccaacagcctctactgtaggatggtttattgtatgtactcattttactgatttcttacaaaaactttttccgtaagggaaattagaatattgttcaacatatattgaattcacaattattactttatttctcacttagtattttatgattctgtcttctttaatatgaagattactatgactgtgttttcactttctgaattatcatgtgtcacatttgtctgtaatttcctttcagaagttgtaaaatagcatgctcaaatgtatatattatgtataaattatataatttataatttattaaaatatttggcttgtatgtttaattgactctaggcacaatgttactattagcatcttcttccagttttcccaacttttatttgactaatagtacaatttatttccaatttttattttatatgtcaatgttttatactgtatttacaatatttatattgttaccatatttagaaatgtaagacttttcaattaaaagctagattacagccttatcgttttgtgtaagaaaagcagcaatgcatcagtagcataatttaaaactttctctagtattacttaaatgcttattccttaaaactttctcatcacagctctttgtattaattataatgtgttttctctgaaatgttgttgccctaactgtatccaaataattcaaaattcatacttttcatagattcacaggaagagttaaaaattgtagttacctgggattctttttcatttggacactatgtttattcaggattttatggattaaagtttctcttaattatgttttataattttatgtttctgtattttttagagtaggctgtctcacatcagttaattgtgtttttactttctacctatttattatgattttgaatttcattattcaaataagaatttgggggttaatgtttattttaactttgttttgcaattttacatttctgtgtttcatgttttagggtagggcaccttatattagtttattgttttaagttttaatttgtataatataatattgtataacaatattcaactctgtatgcattaagacagtgtggggcagaagtcaaatatgaaccatccctatgtcttttgttaatacaatgatttaactgtttgtttgcctgtataaatattgcccctattttgtttatgacttttatattttcttcttatttgatggccaataatttattctgtctaagtgagtaatcatggaaattgtcttaatttcaacatctattgtttatattatcttagtgtgaaggaaagatttatgtgatttgaagataatttttcagaaactttgtaactctctcccttcgggtgtctttttttttttttttttttcttttgacagactctcaccctgttgccaaagtgcagtggcacaatcttggatcactgcaacctccacctcccaggttaaagcaattctccagctgctgcctcttgagtagctggcattaaagttctgcaccaccgcgcctggctaatttttgtatttttcatgaagctggggtttcaccatgttggccaggctggtcttgaacttatggcctcaagtaacctgcatgcctcagcctcccagagtgctgcgattacaggcatgagtgatcactcttggcccttgggtgtcatttttaatttcgattgtggtaaaaatacataacataaaatttagaatctttaatattttttcttatacagttcagtcatgttaagtgtatttacattgttaagcaacatatttgtaaaattttttcttttgcaaaactaaaactcagtacacatgaaatgacaactacccattgtccttaccacctggctcctgataaaaatcattctattttctggttctaagtttcaatactttagatattacatataagtagaatcatagagtatctgttttattgtgactaattttacttagcattatgttctcaagattcctctttattgtggatggtacaagattttctgcctttaaaagctaagtaatattccattagttttatattacaaattttatttatttattcattctatgaggaaaatttgtgttgctttcacctattggcatttctgaataatgctgcaatgaatattggtatgcaaatagctatttgctcatatgtgtgaggtttacatgtgtgctaccttctgttttattggaaaaattgtctgtgtttatgccagaaacaaactgttttcattgctgttgctttgtaatgtgctttgaaatcagaaaaggtgaggtcactaacattgttttttttaaacattttggggctctttatggtcgcttgagattccatataatttgttggttcctttttctatttcaaaaaaaaagttcttaatttaaaagggattgcattgaatctgtaactcgctttagacatcataagcattattcataatattaagtcttacaacccttaaacatgagcatgctcaaaagtgagttgtttaatttccatatatatgttgctatttttgttttcttctgttattcatttctagttttattccattttgatcagaaataatagccattgaaaggctaaaccactctgggaagtgacccccattatagaacattacaaagagatgtgagggcaccacttctgccctgatgggctactgggatgagttctcttagatgacacattgcagacaaatgtaggaaacaatataacccctttttcatgtaaactcttccctatttttgtagagtattagtgatagtggtggctttcaagtcttggagaaagtctggcagtaccatgaacctgcttgctacagatgatatcagaggggaataattaaaactatacaaactgtagtaacatgaataaatgcagcctagtgtaaagtaaaaacaacacaaaggccttctctgatatttctacaagaatgtaaaaagggactttacacttaaccaagttgccactgggaccagttaaggctagatttttggggggtagatctgagggtcactcatggaaatcccctaggagaaagcgcagagaaattccatatttgggtctggatcctggacccatcctggttttgtcaggtccctctctgtagagaaccccatgtgcctgctctcaacataactcattgtatgccatgcttggggggtgtggtgaacctgccagttgtccaaggagatgggggacttgaacccatcaaatatctgctcactgattttaatgcagctctacaaagagtgttcccagcagcgaaaaaagttaattgtcttctttgtttttaccaccaggtgacatctgcattagaaattctgtttcctagatcaggaacataggagtatctgcatagacccccagccaatgaggaaacccgaggacagcttaaggccttgggattcacatctgagtagacgtacttggtccgcaactcacaactttttattccaccaaccgtgacctgggtatgaacatgacagacccaccagggttcctgtgtcttaaaacctgcccctgtgaggaaaagccccctcctttcctgctccccttgcaacacagggtaatggtaggcagggtcgggttgcccagattagatgacacaggtggcctggcatggacggacctgccctgggctaaactgtgttacctgtgggtgcctcttgtcgaatggccagtggtatcaaggatgtaggctgagccagtatgtatactgtcagaaaaggctctcactttgagcctttctcaggcaacagcttgggaatataacacaatgagaacacagtgccctctcaagcatctcccaagaagttagctagatacagggctgtctctagaatgtgggtttctggttcccaaagttctaaattctgttaggttttgtcacaagggaagtctgttaacttcttcaaggttttatcccctgagcccttttcctccataaatctacgcaaagtccctgctgggctgctgattgctcaccctcctctcccatgtcaactctttacctgtaaacagttatgcaaacacaattatgtcccttaattcccaaaaagttctaaatgcagccagggccccaggtttgagagaacagagttgggttaaaatcttcttttccttttcatttctgtgaccatatgaaaatgactgtgtgcttcaggtctccccagccctgaagtatgcataatgggattatgctaacatcaacttccaaaaacagtctttggtgatatatgagatagaatgaatcaaaatcggttggatgcagtggctcttgctgtaatcttagcagattggtagaccaaggcagctggaacacttaaggccaggggtttgaaaccagccatggccagcatggcaaaaacccttctctacgaaaaatccaaaaattagccagatgtgttgatgcatgcctgtaatcccagccactcaggaggctgaggtgtaagaatcacttgagcccaggaagcagagattacattgagccatgatcctgccactgcactccagcctgggtgacagagcgagactgtgtctcaaaaaatatatatatatataatgtatataaatatttttatttatatattatatataactatatatatatcaattatatataactatatataatatataaacttatacatatatatctttatatataaaagatacatagtttatgtatctttatacataaaagatatatattttatatatatggccttaattttccattccacagcagaagaggttgaaattaaaagaaaatcagatactgtcttctggcattaaatattccagtgctgtgcattatatttagaatcatatgtatatgcctcatctcagcctatgtggtgggcacccccaacaaagtctcacaacaacactaagttgtgagtgactctgttattttaaaacgcagctcacctctcagtgcctcagaagcaggtactataacaccgggtttctaacagagagatgggattccagctcaagtctgtttccctgtgcttacttaaaggtagtaatattctcagaaaggtttaggaggtaggttctggattagtacggaattgcttaaaggaaaaatgtatggaaaatcactgggcatgaacaactattttttcttgctacacacagatcacatgtgcaaatttggggacagttagtacaaaacatgtgatggaaatttgggctctgacatcagtgagcttatttcacacagactccagttgaccatattggttccgaccaattttagccactttttagaagtctcataagtggaataaatttcattctttcaacaagttgtatcttttcttatctgtcattctgcaaactgaagaatttctgttagtcattggatgaactctttggggacctggttctagtttctgtcaaagggaaaacaacaaatgtgataggttatcacttctgacttagttcagacttctataccaaaaaacatagactaggcaacttataaataaaaaacattagttctagaggccagaaatttgagattgggcttccagcatggttggggtctggtaaggactctcttctgagtttcaaactccagacttcaggttgttttctcatttagcagagagagggagagacagccttctgcggtttcttttacaaagcccgtaatcgctatcatgaggtcctcatgcttcggacttaattacctctgacctgctaaggccattacactggggattaaggttctggtatgtgaacatggtggggaatcacatagtcttctgcaacttccaaagttatatttctaaaacagctattattttcctcttacttgctctgtcctgtgtgtcctctctcaatctctctgtctccctttctctctttttctctgcatatgtctgtctatctctttcatttttcatctctgtattgtaatcctcaagatgaggaagtgatctgcagtgtcctaagatgctctaggcacagacccacatgatagagaactgaggagatgcccaggccaatcgagaggaaggaactcgggctctcagttcacactgaatcgtgccagtttccatgaggcagatagaaggctgatctctcctcaaatccagcttcagttgaaatcacagccccagcctcgtaagagaccttgaggcagaggcacccaactaagctatatcgagattctggttcacaaaagttgtgagatagtatttgttgtcaacatgtgctaaaattcagggaaattttgtcagagaggggcaaatgactaatctcctctttcagtccccaggatcctccctcccctcttttcctttctttctcaggctgcctgccgccacaattgtcccgttataacctcctctgctgaactcacctgtgcctgtgagtctcttcacaaagagtggcttttccctgacacactttgcacacctgcgcaggactggctctctgttgtcattctggtcacaacataatgtcacctcagggaggcattcatgtcccctccaggcaacctctccccagccctccctcccaacattctactttatttccattataaaatgctcttttctttcacatgtacttgctttagtgtttttgtcctgccgtcctcagactgtgggctccccgcggggaggcagggataacataatcatttttggtaccataaggtgaacctaccaaggtagctgccacatggtgagtgctaggggaagagtcgctgagtaaaataacatggaaaatcacaaagcccttcttcccacttttggccacccaataatgtggagatcatgaatgataacaggagctgcaggacctcagcctgtctctcccccggctccagctgctccagtaaagcccagcgggcataagaaacacggggtctgccgccacctagaggcctccactagccctgaagtcccaggtggaagcatcacaaaacaggcacctgcattggggaattctcaaggcagtggctattcaaggacccctgggaaaaggagcagtatctgaagactccaagggccataaaagtaacctcggaaacctcccttgattcctattttcctcagcctctttgagtgtgctgtgcactcattaaacactttaacagcattcagagacattattttcttccacttctgaatgaggacctcaaggacagcccaaaaatctagtattttttctgggccccacactccagagcccagtgcattgtcacattctgctttattccaagtcctcatctgcccacatctctaggcctctctcttctctgaaggacctctagaacctgaaaagcctcttcccagagtctcaaagcacagtgagttaccaatgaagagccaaggggagcagacacttatgagtatctagaattcttggtattattccttttgagtacccctatttatgagagagaaaacgaaggttttctttcccgtagcctcactttatatcacatggggtggttgggggagggcatagctcattttagttccaggtgcccatagaggtgggagtcacaacccctgtcctgtcctcttgaaacagctgggaagatccccaggcctggaagaacccagggaacctggaggatccttcatcacatgctgtcagctcctggtcatgtagctgggggagtggatgcctctgcctcatggcaaagctgcctcttctatttcttcccgttttgtcacttctctggtttcctcttctctaacctcacctccatgatctccaccttagaagcctgtgtgtgtgtgtgtgtgtgtgtggtgtgtttgtgtgttcatggctgcacacctatgtgagaataaggaagggtagaaagcccaggtagaaagtagaccacagggttttccaggacttaagagcactcatttccaaagcaaacctgatgggtggggtgcatgcaaggccttggaagctggatccctccctaatactctgtgctcttcccaatttctgggatatggaccagtctttgccttttttgggggcctcagtcttcctgttgtaaaatggataggtggtcacaaaactgcataaacacatgctcagtgaagacagggtgtcatgctcaataccagatagaatattgggatggggagagtttgagcagacttttgtgtccacggtagctcaggcctctgaacagggcaaatgcaggtgaacataaagcacggcacagccaggttttcttaccagggctacgggatgaaacagtgcaccacaggctctgttctggaggctggtcccgcaagattttccctccttcaaccagcaactgtttgatgaatttcatgtcctgtgaagcccatatccacccccattacagtgaggggcacagggcactagacctgtaaaataatgtcttttgcctttttttcttttcttttctttttctttttctttatctttttcttttaactgagtggctgtttcttctttctctttttctgttttgtttgttttttaactaatttttaagaggtctttacaggtcagctgtggtgcctcacatctgtaatttcaacacttgagaggctgaggcgggcggatcatttgaggtcaggagttaaaaaccagcctggccaacctggtgaaaccccgtctctactaaaattacaaaaaattagccgggaatggtggcacaagcctgtagccccagctactcaggaggctgagacagaagaattgctgaaacttgggaggcagaggttgcagtgagccgagattgcacgtctgcactcaagacagggtgacagagtgagtctctgtggaaaaaaaaaaaagagagagagagagggagagagagagtgccctttatggaaatgcgagcccatttgtaatttcatgagttgtaaatatttattccaatttgggaatttcttttcttattgtggtgttctctttaagtttgttttggatgttattagtgttttgttttgctttgtttctatgtaacttctccctaaattgattcatagatttccattttcacaatacaatattttggcagaaatcttgtggaaactgtctaatcagtttaaaaaatttaaatacatataaaaaatcgaagaaatgtaaaaactgtcctgaagaataacaaagtttgtgagcttaaaatgacatatattcagacttagattaaagctatagtaataaaagctatctatggtagtaatgcaaaaataggcacaaagaaaactagaaaaactcgagagtccaactcagactcacacatttggacattttgtatattacaaaacaggcacagaagaggagtgaagacagtcttctcggtaaatagccttgagtcaaccagttatttatgtgagaaaaaacactcctatcttatattattaacaaattccaatgaaaagtggattttaaattttaaggtcaaagctgaaagcaatatttctagtagataacatagataaatatgtccatgactggcacaggcccagatttcttgggacacaaaatgcattaattctcaagacaaaaatatgacaaattggactttattacaattaaaaccttctcttcataaaaaaaaccttcaggagagctgaaaggcaagaacaaagtggaaatcaacatttgtcatatattgatgtggcaaaagccttttatctagtttatttaactaaatcccatcaattaataaacaaagatgcaatacattgaacaaaattgacaaacatgtgactaggagttccacatacagaaccgaagggccaacaagtagatgaacatatccacatccttatgcatcagaacaatgcatatgaaaactacaattgaatgccactatgcaatcattcacatttttgaaaactgacaaaattaagtactagtgatgatgtcaagcaactggaactttcttataccattctgtgtgcaaactgttataacggcattcaaaacctcttgagtagtaactccttacatacacgatgtacataagcacactctaggacccagcaactctgctactaggtatatacacccaatagaaatgccagcatattttccaatgcagacaaatgctctaagcagcattatttggtacttttccaaactgaaaaaaactcaaatgtgcatcagtaataaaataactaaataaaacagctacatattcctttataaggggacattatacagatataaaattaattggagacatattaaaatatacaaaaatctaacaaatacaatttaattagatttaaaagtcctatccacagcaatcagccaatagaaaagaaaaaggcatacaaatagaaaaaaaaaatgaattctctttctccatttgcattatgagtcactacgtagacaatgctaaagtctttccaaaactccttttggagaaaacttgaaaagcctcctgaaatggataagcaagtaaagttttaggacacaaaaccaatgtacaaaaaccagtagtatttctatgcatcaacaactttgaattcctgaacatcttctggttttattgcattttcaattttttccctccattaactatacattttttcttttttcagctaaactaatttattcttctgtataatttcaccttgttaataaaccccaggccaaaaagtgggaataaagtatttgtctgcatcctgtttcctcattttgaaaactagtctagatgaaacctatacttgttctagggagttggcatagacagcatttatttccgttctcagcagtgatgccaaccagaaagagggagttccgcattttcactttggttagacaggactctggatggttgtaggggaaaagatccaaactctaagggagtcaaatcagacattgcaaagatttatacatttactctgggagcaattattgtgttaaattttgtgcaaaacactgcgcaaagagcaattaaagtgaaaattattaaggcattacctttaccttgggaaactcacactagtcagattctccgaaccccagaacataacaacaacctagtaaaatcttgttcagagtgaagagagggtgggagcaggaaggtaagattaaaaattaggctgggtgaatgagataattacccctagtcaagcagtggaagtatggatggctttgggatgggtgaagacaaaagaatctcagcagagggtgcagataaaaaaaggcagaaacacaggaggcttatgcaggaagaggaatgagtttgctggactggggagagtgacagtaaaaagcagaggataataggcatctctggtcatctagggactatagggtggattagttgggggttacagaatcagtgaggtactttttaacagtaggatgggtaaataagagctataatttggaataattatgtagcaatggtggttaggagcaatagaaactcaaagtattacataaatattttttttcttattctcccacacaagcgttttgcctttcctcttaaactgagaacggagtggtttgctatgatgtttttaaattctcacagacaagcattattgtttgctgccttttagtaaaggttagttttaaccaaattaaagaagattgaatggattttcttgctcataagggttgagtgcaatatctcataccttctactagttttcagtataactgaaataacagagtgtcaatactccatggaggggtgttccgcttgctaaggctccctcctctgggctaggccttctacaccatggctgtcctgctgtggctggagctggaatttggattgacctctgtgtgtcttcctagcacacaataggtgtccaattagcatgggcagaatcaagctcctccctctcaccatttatttctccatttgtcccttgttgggaatggagagtcctgccactgagttcagcccagggttgaagttcaaatctcagctgatacttggtggatgttgacttttttgagaagaacttgggagaataaaacattataaaggcgctggccaggcacggtgtctcatgcctgtattcctggcatattgattggctgaggagatagaattgcttgaggccaggaatttgataccagccttgtcaacatagtgagaccccatttatacaaaaaacttgaagcattaaaaacatttagccaggtgtgatagttccaaactgttgtctcagctatgctggatattgaggcagaggatcacttgagccaggagttctaggctgcggtgaactatgatcacgctactgcactccaaacaggcaaccacgcaagatgattcaaaaataaaatcttttattattcttcacccctatagtctctccagaacttgtgcactatgtagcagaaagaatcaaactccccaagagtttggttcttgctcatgatttggttttctgctgcttggctgccccgtcatgtccccattttgtataaaataagaaccccccagtgaagtggagtttctccccagcagagggtctcaccaaggccccaagactggcactttaggtggaggcttgcctttcagcctctgaataataattgatactaaaattgagaagttttccagacaccagcttcctgaaaggagcatccagtcagaagacaagatgaggtcagtagcgaaggtgactcaggctgagtggggaagtccaccagcgtatctgaagactgagctaggggagggtttccctaatgttcactccttctgccctccatatattcctctacttttcccaaacttccctctgacatcctccaaactttctatcttcccagggctttcttgccagggagtctaatgaagtaaaagctttaaaattgctttgattttaaaaataattttattgattcttaaaatgtaccgacacaaaattagaataccaattcttaaaatgcttaaaaagtaaattaagtgtaagtttacatttaattatcttatttgattcctaattaaaatacaaaaaaaattttttttgaaacaaggtcttgctctgtcacccagactggagtgcagtggtgagatcttgggttattgcaacctccaccccctaggttcaagcgattctcatgcgtcagcctcccaagtagctgggactacaagcacacaccaccaattggctattttttgtgtttttagtagatatgaggttttgccatggtgcccatactggtcgcaaactcctggtctcaagtgattcacccacctcggcctcccaaaatgctgggattacaggtttgagtcaacacacctgaccttaattttttttttaaattataggtaaatttaaattactcagaaatagtcagaattaaccgttgaataccctgaatctttttcccatgcataagcctttctaatctttctattcaaatttggatttgattcggttctagtgttttaaaacctgcttttttccttcaaagaaatgcagaccatctcacaggccaatggacatcacagattttctgatgcttagaggctgactggttgtttatctatgacctcccataatgtacttaagtaacaccctcttgatgatggggttaagttgttgaaattaccttatcttttctgaagcactacgtggaaaatattagatcttgaaagaaacacataaacccataccacacacttcctttgaaattctctgctgcttatttaaagagatgtttattcctgactaaggtcctacattacactctctgtagaacttttggaaactataaaattacaagagaatcaataaagcaatttaatttctcacaggatcctgcttcctataagaaacacatcaattcctataattcggcatatttcctctcaatcatttttctacacattttaaattttgagctctaatgtataagtttggttatactttttaatgtgtgcctttcattaatttgtttaatgttatatcatctcataagcacttctccatgtgataaaaaattctttgtacatcccatttttaatacatatatgtagctccaaagaaaaggcatatcttgtttactcttctaatcccgtagtattcgaaaactttgtttttccaattctttgagataataaactggttagggttagtattttggtccccatttaaattttctaagagttgcctttctacaagtggctaagtgactgttacaaggagaagagccctcctgaaggggtgtgccatggggttgaggcctccctgcaaagtgccttccttgtggcagatccccatgtgtctttctaaaatcagcacagtcagactgagagtgattggaattctgcagctgtgagccctctcgaatcttccttgaattcagatgcaactaatctcctccttggtggacaccaggaagtaggctgtagagcattctgtgaccctgaagaatgacacgatgttcttgatgaagagggtggatattcctgaaggagaaataatgttttctcaacagcagaagcagatatcaagtttattcaatgactgggtcatggaaaatcctgttctctacaggttgatgctacattccaggcaaacccacaccctcggtgtatgccagaggcttcagaaacacaaaggagctcatacaagatgagtgccaggcagctatgaaaagagctgagattctaaaccacaaataaagacaactacgaatataggtgagacgaaaaactgtaaaccttcttaagggtgtacaacatgtaacaacggctcccattagctcatgtttagataccaaggaaataatagcaggaatgttttatgttcacattccaaacaaaacctattatcattctttgtcagttcatttagtcctgttttattcatacttgttttactctatcttgtaagcacatatgcttctctgctagaattagagaaataacttagtccactgatagtgtttcaaagttatgtaagtcattctatcagaagcctgtttataggagtacttggtacagttatttctgtgggtctctgagatattcttattttgttgaagacaaagccctgtggcctggaactgatttgcaagcacttttagaaaaatagccgagtacaaccaaaagtatatactaatgaaaaagtaagccatgctttcaggtatgtagttagttgatacactaaaatattcttttatataatgcaaacagcactaacactttaaaaaatagaattatattatgcacagtgagggcactggaaatttttttaaaaactttaatttctggattatttacgttaataacaattatgtaaaaaatttaacctaggggaagctaagcatatgtcttattatttaatataacaatatgcaaaataggcacgtttccatatatgatactaggacataaagtgtgctgatacaaatatgaaacataaaatataagtaagaaatagaaaaaatgacctgtgtatgttgattatttatatgtgtttattactatttttagtaaattagattatgtaaatatgtattatattttaggcagcagcaaatattaacatattttttaacgtgcagcttagataagaattgatgattacaatttattaatattagctacttacgacaaacattatgcaaaaagaaactctaaaaataattttgtattaactttgaaaattttaaactcttttccacagaagtttttaaattacagacaataaaatagaaagtttataaaaaagaaaatggtactgagaaatagttggattttgattcattattttttctgaatattagtacttggagcttcactgttaataatgccaataggctacacaaattttctcttcagtaaaatggcaaaacagaaggcattcaatttttaaatataagatgcaattttattaccttttttctatataaaagacacaaaatttagaccaataaaaacagaatttcttccatgaaatttcaagagctgagctgagctgggaagagctaacctgcttaatatcagagttttaaattaaagcaagaggcccacatcaaagaaatagttatgcctttttgtcttcctttctgtgattgtgttaaacaacaggcaacattagatcaagcaccgactcctcattgttccattttttcctcatggaaaagcaccaggaaagggtcagatggatcagcacaaatatggggcactgtctcactgccgaggtggcaccctcataaaaaacaggcccgcaattttgtggaaaagggggcaggagagcgtagaggagaatgtatgagcaagattaaagagaattgaatattaataggaatctataaaaattattatcaaagttccatttcttctccagaaacagggatctgaacaaaagtttctgaagaaggcctcaaccaaaaggccctcaggaaggtgcccctgaatctagatgcctggactgggaatgaaaatctacatgtgagcctcagtggccaagatttccggtattgtttatttcagccccttagagactgcaaagcgctgacatttacatgcttctcctacatgcacatgtcagcagcagtgtgataaccaatgctttcaaagatataatgtgggtatgagagtttctggcaaaaatttagataatcttatcttttcaacctcaaataacaatatatgctgagaaacttcaaaggcatgtacctccacaaataatttttcaggaaagaatgaagaagcacagctgtagaataaaaattaggctggaagttgatgctacctgtgggaattgctaataatggaagcacaggttgttagaatttaacgtgtctgattggtgaatataatgtcacagcagcatagatgcaggagtacttggatctgactatgctatctaaagctagaatccttacattttcaaaagtttagaaaaataggttagttagtggaggtggtatttctcctctttggttgatttggaaattaacaccaatcatcatatgagtttctggtttatatgtacactatgtgttttactcaggacaatttaggtaaatatatagacttaatcattttcaggtgtctgtaaagggtgcattattaacattacagataacttttcactggaataaaatacctcgacccagaatcttcaatggccccatcaattgaggtcagtcatttataataaaatgaagtctactattctttttaaaatatacaaagtaaaagtcatcaagatcaaagttattaagaaacaaaattataagaaaaacacagctgtaccattacatcttaaaaaatcccaaaattgtatatatactgtagaaataatataagtagttataatgtttaaatatattagaggaaaagtttaaaagtaagatcaaaataagttatattatcaaaataattaggtaaaaattttaaatttaaaggatagaatgcatagaaaaattacataattgaaaaagaaattatgaattagaagatatgatgaagtgaatatttagaagtcccaatagggataaaacaaataaacaatatgaaaaattaaaatacataaaaatctaaaataagtcatgttgtttaagtgcaagttcgaataaataaaatggagtgaatgtcaaatagggaataaaaatatataattattaaaataattaattataatagcttaaaggcattctgatcaaaagaaaaacaatagttaaaagcataataccataatagagaaaatcacgtaaagctatctaagataaaattcaaattaattataaagcaatgaaaagaaacatatttctcaatatgtgaataagatcaagaatccaataggttatggttttcaaagttctgagggaaaaacatgtaaatttaaaattacatatatttgaaaagttattttcaggtttaaggacaaaatgtaacttaatacacaaatacaatgtaagtataattacgtcagtgaaatgcatttaaaatttgctgaaaatttagtttataaagaaaaacactcttcctgagaacaaacattgagataaaataaatgtgcaaacatctaaatagatggaaactatattaacactgtgtgaaattatacacaatatgtgatatatccatgtgaagcatatttatggaagcataaaagaaaatgttatcccaagagttatattaaataaaagagtaaatttgataatagatgagtaacttattttatatcagtataatgtatatttaagagatttttgtcactaaattattaaatattgagtgcaaatcctatatactgtttgaacaatactattattttctcagcaaagatcagcactgaaagactgactcctgcatagccactgaccacagcttctggaacaacaaaagcattgaatcattaatcctgaatgtggccaatgagcatgagatgaggaaatctacccagttcatgaccacaaagcaactcaccagcagctggatggcctgggtagcttatttctctggagagacttagacagtgactcctgatacagagatgctgagactgcattttgtgcctggaggagagaattaccacgtgtgattgagagcatcagtgttcctccagaagagacatttctaaatgctgctagtgtgaaaaccgagcttatgttcacgtagcccctgggggaagaaaaacagtaatatttaacagtacattttaagaaccaataaaattatttttaaaatcaaagcaattttaaagcttttacttcattagactccctggcaagaaagtcctgggaagacagaaagtttgtaggatgtcagagggaagtttgggaaaagtagaggaatgtacggcccactcagcctgggtcaccttcgctactgacctcatcttgtctcgactgggtgctcctttcaggaagctggtgtctggaaaacttctcaattttagtatcaattattattcagaggttgaaaggcaagcctccacctaaagtgccagtcctggggccttggtgagaccctctgctggggagaaactccacttcacctgggggttcttatttatacaaaatggggaaatgagggggcagccaagcagcagaaaaccaaatcataagcaagaaccaaactcttggggagtttgattctttctgctacatagtgcacaagttctggagagactataggggtgaagaataataaaagattttatttttgaaacatcttgcatagttgccctggttggagtgcagcagcacgatcatagctccctgtagcctagaactcctggctcaagtgatcctctgcctcaatgtccagcatagctgagacaacagtttggaactatcacaccaggctaaatgtttttaatgcttcaagttttttgtataaatggggtctcactatgttgacaaggctggtatcaaattcctggcctcaagcaattctatctcctcagccaatcaatatgccaggaatacaggcatgagacaccgtgcctggccagcgcctttataatgttttattctcccaagttcttctcaaaaaagtcaacatccaccaagtatcagctgagatttgaacttcaaccctgggctgaactcagtggcaggactctccattcccaacaagggacaaatggagaaataaatggtgagagggaggagcttgattctgcccatgctaattggacacctattgtgtgctaggaagacacacagaggtcaatccaaattccagctccagccacagcaggacagccatggtgtagaaggcctagcccagaggagggagccttagcaagaggaacacccctccatggagtattgacattctgttacttcagttatactgaaaactagtagaaggtaagagatgttgtactcaaccattatgatcaagaaaatccattcaatcttctttaatttggttaaaattagcctttattaaaaggcagcacagagtaatgcttgcctgtgagaatttaaaaacatcatagcaaaccactccgttctcagtttaagagggaaggtgaaaggcttgtgtgggagaataagaaaaaaacatatttatgtaatactttgagtttctattgctcctaaccaccattgctacataattattccaaattatagctcttatttacccatcctactgttaaaaagtacctcactgattctgtaacccccaactaatccaccctatagtccctagatgaccagagatgcctattatcctctgctttttactgtcactctccccagtccagcaaactcattcctcttcctgcataagcctcctgtgtttctgcctttttttatctgcaccctctgctgagattcttttgtcttcacccatcccaaagccatccatacttccactgcttgactaggggtaattatctcattcacccagcctaatttttaaccttaccttcctgctcccaccctctcttcactctgaacaagattttactaggttgttgttatgttctggggttcggagaatctgactagtgtgagtttcccaaggtaaaggtaatgccttaataattttcactttaattgctgtttgcgcagtgttttgcacaaaatttaacacaataattgctcccggagtaaatgcataaatctttgtaatatcctatttggctcccttagagtctgaaacttttccccttcaaccatccagagtcctgtctaaccaaagtgaaaatggggaactccctctttctggctggcatcactgctgagaacggaaataaatgctgtctatgccaactccctagaacaagtataggtttcgtctagactagttttcaaaatgaggaaacaggatgcagacaaatactttattcccactttttggcctggggtttattaacaaggtgaaattatacagaagaataaattagtttagctgaaaaaagaaaaaatgtatagttaatggagggaaaaaattgaaaatgcaataaaaccagaagatgttcaggaattcaaagttgttgatgcatagaaatgctgcttatttttgtacattggttttgtgtcctaaaactttacttgcttatccgtttcaggaggcttttcaagttttccccaaaagtagttttggagaggctttagcattctctacgtagtgactcatattgcaaatggagaaagagaattcaatttctttttctatttgtatgcctttttcttttttattggccgattgctctggataggacttttaaatctaattaaattgtatttgttagatttttgtatattttaatatgtctccaattaattttatatctgtataatgtccccttataaaggaatatgtagctgttttagttatttattttattattgatgcacatttgagtttttttcagtttggaaaagtaccaaataatgctacttcgagcactttactacattggaaaatatgctggcaattctattgggtgtatatacctagtagcagagttgctgggttctagagtgtgcttatgtacatcgtgtatgtaaggagttactactcaagtggttttgaatgtggttataacagtttgcacacagaatggtataagaaagttccagttgcttgacatcatcactaatacttaattttgtcagttttcaaaaatgttaatgattgcatagtggtattcaattgtagttttcatatgcattgttctgatgcataagaatgtggatatgttcatctacttgttggcccttcggttctgtatgtggaactcctagtcatatctttgccaattttgttcaatgtatgcatctttgtttattaagtgatgggatttagcttaataatctagataaaaagcttttgccagatcaatatatgacaaatgttgatttccactttgttcttgcctttcagctctcctgaagcttttttttttatgaagagaaggttttaattctaataaagtccaatttgtcatatttttgtcttgataatttatgcattttgtgtcccaagaaatcttggcctgtgccaaagtcatggacatacttatctatgttatctactagaaatattgttttcaattttcaccttaaaatttaaaatccacttgtctcgaaatttgttaacaatataagataggtttatttctttctcacataaataaccagatgacccaaggctaattaccgagatgctgtcttctctccactgctcttctgtgcctgttttgtaatatacaaaatgtctaaatgtgtgagtctgagttggactctcgagtttttctagttttctttgtgcctatttttgcattactaccatagatagcttttattactatagctttaatctaagtctgaatatatggcattgtaagctcacaaactttgtcattcttcaggacagtttttacagttctttgattttttaatatgtatttaaatttttaaactgattagacagtttccacaagatttctgccaaaatattgtattgtgaaaatggaaatcaataaatcaatttggggagaaacactaataacatctaaaccaaacttaaagagaacaccacaataagaaaagaaattgcaaaattggaataaatattttcaacacatgaaattacaaaggggctcatgtttccatgaagagcactctctctctccctctctctctctctttttttttttttttttacagagactcactctgtcacccagtctggagtgcagtcgtgcaatctcggctcactgcaacctccgcctcccaagtttcagcaattcttctgtctcagcctcctgagtagctggggctacaggcttgggccaccattccccgctaatttttttgtaagtttagtagagacggattttcaccaggttcgccaggctggttttgaactcctgacctcaaataatccacctgcctcatcctcccaaagtgttgaaattacaggtgcgaggcaccacagctgacctgtaaagacctcttaaaaattagttaaaaaacaaacaaaacagataaagagaaagaagaaacatccactcagttaaaaaaaaaaaaaagaaaaagaaaagaaaagaaaaaaaggcaaaagacattattttacaggtctagtgccctgtgcccctcactgtaatgggggtggatatgggcttcacaggacatgaaattcatcaaacagttgctggttgaaggtgggaaaatcttgcgggaccgacctcaagagcagatcctgtggtgcactgtttcatcctgtagccctggaaagaaaacctggctgtgctgtgctttatgtttgcctgcactggccctgttcagaggcctgagcacgcatggacacctaagtctgcccaaactttccccatcccaatattctctgtggtattgagcatgacaccctgtcttcactgagcatgtgctcatacagttttgtagccaactctttattttacaacaggaagactgagacctcccaaaaaggcaaagactggtccagatcccacaaattgggcaaagcacagagtattagggagggatccagcttcctaggccttgcatgcaccccacccatcaggtttgctttggaaatgagagcccatgagtcctggaaaaccctgtgctctactttctacctgggctttctactcttcaatgttgtcacataggcgtgcaggcatgcacacacaaacacatcacacacacacacacacacacacaggcttctaaattggagatctaaagtggagattctaaagtgaggttagggaagaggaaaccaaagaagtgacaaaaggggaagaaacagtagatgcagctttgccatgaggcagaggcatccactcccccagctacatgaccaggagctgacagcatgcgatgaaggatcctccaggttccctgggttcttccaagcctggggactttcccagctgtttcaagaggacaggactggggttgtgactcccacttctgtgggcacctggaactaaaatgagctatgccctccacccaccaccccgtgtgatataaagacaggctacgggaaagaaagcctttgttttctccctcataaataggggtactgagaaggaataataccaaggattctagatactcataggtgtctgccgcccttggcttttcattggtaaatcactgtgctttgagactctgggaagaggcttttcagtttctagaggtccttcagagaagagagaggcctagagacttgggcggatgaggacttggaataaagcacaatgtgacaatgcactgggctctggagtgtggggcccagaaaaaatactagttttttgggctgtccttgaggtcctcattcggaagtggaagaaaataatgtcgccgaatgctgttaaaatgtttaatgagtgcacagcacactcaaagaggctgaggaaaataggaatcaagggaggcttccgaggtcacttttatggcccttggagccttcagatactgctccttttcccaggggtccctgaagagccactgccttgagaattccccagtgcaggtacctgttttgtgatgcttctgcctgggactacagtgctagcggaggtctctaggtggctgcagaccccgtgtttcttgtgcccgctggacttgactggagtagctggagccgtgggagagacaggctgagggcctgcagctcctgttatcattcttgatctccacattattgggtgaccgaaagcaggaaggactttgtgattttccatgttattttactcagcgactcttcccctagcactcaccctgtggcagctaccttggtaggttcaccatgtggtaccaaaaacgattatgttatccctgcatccccgcggggagcctacagtctgaggacggcaggacaaaaacactaaagcaagtacatgcgaaagaaaagagcattttataatggaaataaagtagaatgttgggagggagggctggggagaggttgcctggaggagacatgaatgcctccctgaggtgacattatgttgtgacgagaatgacaactgcgcaggtgtggaaagtgtgtcagggaaaagccactctttgtgaaaagactcagaggcacaagtcagtttagcagaggaggttataaagggacaagtgtggctgtaggcagcctgagaaagaaaggaaaagaggggagggtgtatcctggggcctgaaagaggagattagtcatttgccgctctctgacaacattgccctgaattttagcacattttgacaacaaatactatctcacaatttttgtgaatcagaatctcgatatagcttagttgggtgcctctgcctcaaggtcccctatgaggctggggctgtgatttcaactgaagctggatttggggagagatcagcctccaatctgcctcatggaaattggcaggattcagtgtgaactgagaacaccagtttcttcctgttgattggcctgggcagttcctcagttctctatcatgtgggtctgtgcctagagcatcttaggacactggagatcgcttcctcatcttgaagaatacaatagagagatggaaaatgaaagagatagacagacatatgcacagaaaaagagaaagggagacagagagattgagagacgaaacacaggacagagcaagtgggaggaaaataatagctgttttggaaatataactttggaagttgcagtagactatgtgattccccaccatattcacattccagaacattaatccccagtttaatggccttagcaggtcagaggtaattaagtcctaagcatgaggccctcgtggtagagattactggctttgtaaaagaaaccgcagaaggctgtctgtccttctctctgctaaatgagaatacaacctgaagtctggagttcgaaactcagaagagagtccttaccagaccacaaccatgctggaagccaatctcaaatttctagcctccagaactaaagtcttttgtttataagttgcctagtctatgttttttggtatagaagcctgaactaagtcagaagtgataacctatcacatttgttgtattctctttgacagaaactagaaccaggtccccaaagagttcaaccaacgactagcagaaattcttcagtttgcagaatgacagataagaaaagatagaacttgttgaaagaatgaaatttattccacttatgagacttctaaaaagtggctaaaattggttggaaccaatatggtcaactggagtctgtgtgaaataagctcactgatgtaagagcccaaatttccatcacatgttttgtactaactgtccccaaatttgcacatgacctgtgtgtagcaggaaaagatggctgttcatgcccagtgactttccatacatttttcctttcagcaattccctgctaaacaagaagccacctcttaaacctttctgagaatattactacctttaagtaagcacagggaaagaggcttcagctggaatccaatgtctttgttggaaacccggtgttatagtaccggcttctgaggcactgagcggtgagctgcgtttttaaataacagagtcactcacaacttagtgttgttgtgagactttgttgggggtgcccaccacataggctgagatgaagcatatacatgtgattccaaatataatgcacagcactggaatatttaatgccagaatacagtatctgattttcttttgatttcaacctcttctgctgtagaatggaaaaataaggccatatatataaaatatatatcttttatgtatacagatatatgaaatatatatcttttatacataaaggtgtatatgtataagtttatatattatatataatatataaatataaattatatatacatagtatatatatttttttgagacacagtctcgctatgtcacccaggctggagtgcagaggcatgatcaaggctcaatgtaatctctgcttccttggctcaggtgattcttacacctcagcctcctgagtggctgggattacaggcaagcatcaacacatctggctaatttttgcatttttagtggagaagggtttttgccatgctggccatggctggtttcaaacccctggccttaagtgttccacccatcttggtctaccaatctgctaagattacaggcaagagcaactacatccaactgattttgattcattctatctcatatatcgccaatgactctttctggaagttgatgctagcctaatcccattatgcatacttcagggctggggagaactgaagcacacagtcattttcatatggtcacagaaatgaaaaggaaaagaagattttaatccaactctgttctctcaaacctggggccctggctgtatttagatctttttggggagtaagaggcataattgtgtttgcataactgtttacaggaaaagagttgacatgggagatgagggtgagcaatcagcagcccagtagggactttgcatagatttatggaggaaaagggctcaggggataaaaccttgaagaagttaacagacttcccttgtgacagaacctaacagaatttagaactttgggaaacagaaacccacattctagagagagccctctatctagctaatttcatgggagatgcttgagagagtactgtgttctcattgtgtgctatattcctaagctgttgcctgagaaaggttcaaagtgagagacttttctgaccatatacatattggctcagcccacatccttgataccactggccattcaacaagaggcaaacagaggtaacacagtgaagcccaggtcaggtccgtccatgccaggccacccgtgtcatctaatctgggcaacccgaccctgtctaccattaccatgtgttgcagggggagcaggaaaggagggggctctttctcacaggggcaggctgtaaggcattggaaccctggcggctatgtcatgttcatacccaggtcatggctggtggaataaaaagttgagcattgtggaccaagtgtgtctactcagatgtgaatcccaaggccttaagctgtcctcgggtttcctcattggctgggggtctatgcagatactcctatgttcctgatctaggaaacagaatttctaatggagatgtcacctggtggtaaaaacaaaggagataattaattttttttcttttttctttttttttttttcctgcttcactgctgggaacactctctgtagagtttcattaaaatcattgagcagatatttgatgggttcaagtcccccatctccttggacaactggcaggttcaccacacccccaagcatggcatacagtgagttacggtgagagcaggcacatgggggtctctacagacaggggtctgacaaaaccaggatgggcccaggatccagacccaaatatggaatttctctgggctctctcttaggggatttccatgagtgacccaaagatgtgcctcccaaaaatctagccttaactagtcccaaaggcagcttggttaagtgtaaagtccctttttacattcttgtagaaatatcagagaaggcctttgtgttgtttttactttacactaggctgtatttattcatgtttctacagtttgtatggttttaatttttcccccctggtatcacctgtagcaggcaggttcacggcactgccagaccttccccaagacttcaaagccaccactatcactaatactctagaaaaataaggaagagtttacatgaaaagggggttatattgttccctgcatttgtctgcaacgtgtcatctcagagaacacatccctctagcccatcagggcagaagtggtgccctcacatctctttgtaatgttctataatgggggtcacttcccagagtggtttagcctttcagtgactattatttctgatcaaaatggaataaaactagaaatgaataacagaagaaaacaaaaatagcaacatatatatggaaattaaacaactcacttttgagcatgctcatgtttaagggttgtaagacttgatattatgaagaatgctcatgatgcctaaagcgagttacagattcaatgcaatcccttttaaattagcaatgtttttgaaatagaaaaaggaaccaacaaattatatggaatgtcaagcgaccataaagagcccaaaaatgttttaaaaaaaaacaatgttagcggcctcaattttctgatttcaaagcacattacaaagcaacagcaatgaaaacagtttgtttctagcataaagacagacaatttttccaataaaacagaaggtagcacacatgtaaacctcatacatatgagcaaatagctatttgcataccaatattcattgcagcattattcacaaaggccaataggtgaaagcaacacaaactttcctcatagaatgaataaataaatataatttgtaatacaaaagtaatggaatattactcagcttttaaaggcagaaaatcttgtaccatccacaataaagagaaatcttgagaacatgatgctaagtaaaattagtcacaataaaacagatactctatgattctacttatatgtaatatctaaagtattgaaacttagaaacagaaaatagaatgatttttatcaggagccaggttgtaaggaaaatgggtagttgtcatttcatgtgtcctgagtttcagttttgcaaaagaaaaaagttttacaaatatgttgcaaagcaatgtaaatacattaacatgactgaactgtataagaaaaaatattaaagattctaaattttatgttatgtatttttaccacaatcgaaattaaaaatgacacccaagggccaagagagatggctcatgcctgtaatctcagcactctgggaggctgaggcatgcagattacttgaggccatgagttcaagaccagcctggccaacatggtgaaaccccagctctatgaaaaacacaaaaattaaccaggcgtggtagtgcacacttttaatgccagctactcaagaggcagcagctggagaattgctttaacctgggaggtggaggttgcagtgagccaagattgtgccactgcactttggcgacagggtgagagtctgtcaaaaaataaataagtaaagacacctgaagagagagagttacaaagtttttgaaaaattatcttcaaatcgcataagtctttctttcacactaggataatataaacaatagatgttgaaattaagacaatttccatgattactcacttagacagaatcaattattgtccatcaaacaagaagaaaatacacaagtcataaacaaaataggggcaatatttatacaagcaaacaaacaattaaatcattatattaacaaaagaccatagggatgcttcatattttttgcctcacactgtcttaagctgtacagatttgaatattgtcatagaaaattatattatataaattcaaactaaaaacaataaactgatgtaaggtgccctaccctaaaacatgaaacacagaaatgcaaaattgcaaaacaaacttaaaagaaaccttccccgaattcttacttgaataatgtaattcaaaatcataataaataggtagaaagtaaaaacacaattaactgctgtgagacagcctactctaaaaaatacagaaacataaattctaaaacataattaagagaaactttgatctataaaatcctgaataaacatagtgtccaactgaaaaagaatcctaggtaactacaattttcaactcttcctttgaatccataaaaagtataaattttgaattacttggatacaattagggcaacaacatttcaaagaaaccatattataattattaaaaagagatgtgatgagaaagttttaaggaataaaaatttaagtaatactagagaaagttttaaattatgctactgatgcattgcttctttccttacacaaaagggtaaggctgtaatctagcctttaatagaaaggtcttacatttttacatatggtaacaatataaatattgtaaatacagtataaaacattgacagataaaataaaaactggaaataaattgtactattagtcaaataaaagttgggaaaactggaagaaaatgctaatagtaatattgtgcctagagtcaattaaacatacaagccaaatattttaataattaattatataattgatacataacatatacatttgagcatgctgttttacaacttctcaaactgaaattacagaaaaatgtgacacatgataattcagaaagtgaaaacacagtcatagtaatcttcatattaaagaaaacagaatcataaaataataagtgagaaataaggtaataattgtgaattcaatatatgttgaacaatattctaatttctcttacggaaaaagtttttgtaagaaatctgtaaaatgagtacttacaataaaccatcctacagtagaggctgttggcatacagtgtttaaatttctatgattaggtcctactaaggaaaagaaaattttaaaataaaataattagattttcctatttaataagataatttttgcctataaagtttttcagtctaattttttttgtagaattaggttttagccttcataaaacttgacattatgaagcagaaaacaggtgtcatctgtctctgttgttcctggaatttctaacccaaatgccaattcctccacaactcccctcacacacttctgaattgaagcacaacagatttattaaaaatggcataacagcggtctccagaaatgtgcagagattttcccagatccctaaaagcaatgacaaactattcagatcatttaggttctcacaagattctgggaggacttcggctttcagtgtgaattcactggaagattctaagagagaggaagagagagagaatgtgtgtgtgtgtgtgtgtgtgtgtgtgtgtgtgtgtgtgtgtgttgaaatcagaaccccaccttatgtgtttattgtggaatttggaaatgaaagcctaaagcccaaaattaaaatcacacataatagcacgttgcaaactgttttctgtgctagatgggtcgttctagggtgtaggaccctggtaacaccgttttcccctccttccggaaagagctactcacactgctcaaagcctgcatccacatgtaccatgtcgaagaccagctcaagagcctggacccatatgccaccttcagcagggttgactgcagctccttgttcttcctgagcatcttctccaatggtgacctgagagttgcgggaggcattggggccaggattgaacagaggaaaaaggagcatggaggccaggtgctgaggaccaggccatcttacctggagagttctggccctgagacatccagaccaacatgacgtttaggtgcagacagctggccctgggtggccctgtgctgatcaccggcctcggcccctcaaacagtgggaaatggaagaatggcttggaaatgggccctgtcgactgtgtgtcatctgagcacattctcccaggggcccaagaagggccatcgtgtctccagaaccagaactggaaggtaaactgtcaggggggacaaggaagagggtcctcagttgggtggagggtctcacagcaagacgcctggcttaatcaaacttggccattcctgaagcacgttcagtgactaaaagtgcctaacatgagcagctggaacccactccctgagagctgcaagatccatggggacctcatgtacctgtttgtaattacagacaaggaccagcaggcagcattaccgcatccacatggggcttttgctggacacagtaagtctctgccagcccctcccaggctcctgggatgccacttgttctggatctgtggacagataaccaggatacttgctcagtgtccatccactccttgtggcctgaagcctatcgctcaaccctagccccaccagacctgcttcctaaggcattcctcttgccagaaggaaaggcaatgcctttgtcccacagcccctgccttgtgtcatgtcatgtgggggtatggaatgaatcggcagccgaaactcctgtccttctgcctgagaattctatcttctctgtctgagttaccctctagggagctgtcagtgggagagagagcagctgtggaagagagtcccacctgcttctgtttgacttcagggcagcctctcagggcaagaacccagagcaggtggaggcctcacagaagcctgtggcagggctctgggcttgatgggctgagcatctccctatctgctgtctgcaatggggcccagaaccatccattcaagagggtcaccaccatattgcaggtgtgcagctggactgttcccaaggcagaggctgccatggactgcaagcacacagaggatgtacaccttgagcgtggactatgaggagaacatttttgaagaggtgcatgcagcctggccctgccttcactgggaacccccttccttctgggtactagacagaattctgtacactttcctggaggctccattctggtctgttcatttggaagtttcaggctgtctgtgaggaagtaacaaaagagatgtctcaaagcaggttgtggggcacaggctgagcccttgtctccctccctagtccctctgcagacacggggctggaagaaggacctgtggataatgagggaactgctcttcgagaaccggcctgagcagctgcttcaagaaagagccacattaaaggtgcctatagcccctgatgagggaatggcagcctcaggcccgcctgccatctgtgagcaggttttcttgctaacaggatgaaagcaaagaaagctggaatgagcccagccctctcaggcagcttgaaggctgttggggctctttccaggccttctagccttatgctttttggcaggccacttaggcacctttttccagcctctgagacttccatgctctggaaggagagggtcccacttttcactaggctatggggcaggcccatccagctcccggctgccactaacaaccatggggctctcacctgggcacccactgcccaaacatggcccttctaaggcagaagatcatgtgtcttgcagtttcagcttgctagggcttaaaagttatcagtgctgttattaagatagggaagtgagaaaggaaaacttgctgtaaaagtttcccataatcttaccacggagatcatcagcacagatgacagcacaggtggggctgctggggaggctgagggagagtgtccagcctgttctgccagctggtccttgccaggggtgtctcgtgacccagtcccttagagaagcatgcagatatcttagcaagtatctggaaggtgcagatcagggcaacccagcaccactgatggtggagtgggcctacctcccatcaagctgtgtctccacagctgacccttgaagccaggaggtgatttacaacatgtgcaaggcagtgagctccatcagctgtgtggccttcaacattcacttcaactcggacatctcaccagaaagcagtggggactggccaatgcagaagcctgcaaagtggaacagagcgtcatggggtgggggatgtggggcctgcctgctcatctgagcactgctccctgagggtgtgatctgcaggcttcctgaaggagggctgtgagctcatctgcgaggccctgagcctgtggaacatggctgaggccaagcccatggggatttgtgtctacttgcacctccttgctcatctcagtacactacaggtgactgtgccgaggtgggccttgagcatcccctgggctgtgttagcaaagggctctgggcctggcctggcattgagggatggcaaataaggggcctggggttgcattgtcaccccctatggtagcataaaatgagagagtccgacctgcaggactggaaccctatcaagggggttaggaggctgctcactttccctcagggacccatgtggaggagctgagggaggttaaggagaccctagggactcacttgttctgtctgggcttccctctgctccatcgtttgatgaccattttctgggaagagctcaggaacctcctgtgctctagtgagacggggcctcccctcacagggtattctgagactgtgagtgagaagctaacacagtgccttgcaatactcacgggagctgtcatcctctgtgaccatcacgtggccttgtagtgttcagactgcctggcctgcctggggtttggtgaggctgttttgtggtcagctgctttagaagctcactttctctgcaatcaaacagtgactgttttcatgtctgtttatgggtttaaaaaatcctaatatttcctttatagtagtttcagcttgcatgtgtttatttgtataaattttagtggaataaagagagcttaagacaacagcattttaaggtcttaatgaggcatagactttcatgtcacaacagctaatgttgacctctgtttgctacctttgtgtaaagtatacacataaagtacagccagaggtgactagagctgagctgcttgggcttgcttgctggcctgcagtcaggtggactctggctgcaaggcggtgcccaccctggatctacatcccccactctctctccttagtctctgagtaaccaacaaggccgtgctaatgagcgggcgagtgatgggcatcgcgtaccccaatactatctgggaagatttgaatgccaactgggctggagctgttgggattaggggctgtggctgccttggcttgtcatggtgccacccacagatgtgcctgccctgtgctgcttctccagcaaccggctgcccatggccctgagcctgtcacaccatgcttgctacctcatgctacttgtgtttgaaaaacccatccagagatggcattgctggatgtgagtgctgaaaagggggcagcacctttgtcctgggggattaggagctgaccagattcctcttgactccctcccagaacaagaggggcaggtgctgcaattaatgatgccccccagaagatgtgtttgcactggctgagggaatacacgatgcagagacctaaatgaagacacgtgaatggggtgtgtgggcatcagttagcaactgggaaacaggtgcctctcaggcctctcgtgctccagcaagagtggaatatgcctgtgcccatgagtgtagacatctggagtgtatacatttggctgctgcttttgctgccactatccccaggtccaacctggcttgaagtccaggttttaagtaaaaaaataggaggctttttgccatacagctacttgagaggctgaggtgaaagcatcactggaggctaagagtttgaggctgcagtgacccatgattcagccactgcactgtcagagtgagacctgcgtgcacccttctacagataatagctctggggcatttggggatccctacagtccgggacatctccctgtcccctgctgcctgtgcttcttcccttgcctgctgtcagagcctaacatggaggaggaggttgctgccctgtgagcctgagggagctgtgtctgactgggacttctgtctggggttttgtgaagagctacttatgagtatggtctgtacagataccttgtttcaaagaaagtgagcatgagctagcaagtgtagccaccccacagctgataaacaactttgtcttgtttttaaatcatcaatcttcatttcacattggaataaagtaattgaagcctgctaccccagcctcgcccgtgtgttctgtaacccagactcatttcgttgtgtgggctgttgtcagaaatgttataaaaaaaattacgcataaataatatcaaatgtaaaattatgcttataatgtcacttgagtgggtggtaagagggtagagtcacaggaaatctgttggggtttacacccctgatacttaccaagctcatgagagtgtggcagaggtgatcatcacctgacatttgtggcagaagagaaaagtccagcctgaaggccaggtaagggagaggtgccaggttgtggggccaggccctgcgcatgctgggcctgttatgtcactgaacatctaactgcccgggaaccggctcttttcacatcatctgaggtaagaggatggagaagcactctccagaagtcacactgcgctgggagaatagaggagagcctacaactcaccatcctaaggtaggttttacattgagctgaactgtcttcgagagctaatgagatgggaggaagacagtcccccaggtgcacctgacagccagagcctatgaagttaggggggttgtgtgggggtggcctgttcctatgagaagaggagcttaaagctactaaagctggtggctgctgctctgccatccctctacagagcaggcaggtcctcagctgcatgtatagctgaatgtcttttggagtgttagagagtcctctatgtcttagaaattttgaaaagaaaaacaaatctcaattttaatgttgattagtttctctgagccagttgggaaaaagatgtccttcacctcaaagatttaagtgacaccgaagggtagccaccagtgtctcggccactgaagcctcatgcatgctctcactaccagtttgatttgcagccccatagttgtgttgtactacatattctttcctctggccttgtccagtgaacacggttcacatggctaacaccacttcttgagatgcgagcaccatgcaaagctgagaacggattgggttttgtgacgattgtgcctcctcctcacctgagaggcccatttttcctggttgattcattaagtgtattagtgctgtcagtcgcctctggacaattgaaatgacaagtggctgttgattcataaagaaaatgaaggctttagatgtgaaaccctcgttttctcttgtccttctcttaggtgaaagattttatttttttcaaaaggctacatactggtatcccagcaggtgtagtgtgagaactggcatatgttaggctatggtgtcagtgtggatgggcaattcttcaagatggaaaaccaagtctcactgagttgctggagccacagtgacctttctccacatcccccaccatgggctttcacttttctcctgtgcttgaatttttttcacatacaaattctttatacacacacacagacagacacacacatatctcactctgtcaatgcagtggctgaatcatgggtcactgcatcttcaaattcttaggctccagtgatgctttcaaatcagcctctcaagtagctgggactacaggcatgcaaagctacacccagacaatttttaaatatttttctagagactgagcctacttatgttgctcagactcgtcttgaactcctgggatcaagcgatcatcccaccttggccacccaaagtgtttagattacaggtatgagctagcactctcagcaaaaatatattttaaagaaccgttacaaccaaattatgagttatcattatgccactgccctccagcctgggcaccagagcaagaccttgtatccaaaaactaagcaaaactaagcaagaacaaaaaaaaaaccttataactaaattaaactttgaagattgtgtcatctgtgtccttccctgccctccaagctatcaatgttaaatataatggttattgagaaaatggttagatattattaagaaatttctatatatcctccagctgagaataggtattctgatgtggcccaaatattttctcaccgctaccttcagggtctaaactagcaagtcaggacacctgcagaggacagttgaccattttcaaatagaaagagaaataccccgttcatgagagtaatccagtgattttcaaaaagacaagacacactgacatccagcgcagtcagggcacaattaccttggaaaaatcacctcacacagaatggttgaggagactttctaaggtgagcaaatttgggaaacataatcctttcttatttatttccagcccccgctgcccccctgattcctaatggtcacacaacagtgtggtcagcagtggggtgcagtgttgtgagagaggggctcagggatgggatgaaggtctttaccgcgttacaaaaatgcaggttaaaaagttgctaaaaagatgtctaaatattctaattcgtactgttacatagctgctaagatgcattatacaacagacccaggtaagggaaagagcacgtgcatttcaagtctcagctcacgtctgaattagctgtgatactctgggcacgtgaccccaaatataggagcctgtttgcctgtcaacccaaaacaatcctaagcaaaaacaacaaagcttgaggcatcctgctacccgacttcaaactatactacaaggctacagtaaccaaaacagcacagtactgataccaaaacagatatatagacaaatggaacagaacagaggcctcagaaataacatcacacatctacaaccatctgatctccgacaaacctgacaaaaacaagcaatggggaaagatttcctacttaccaaatggtgctgaaagaactggctagccacattcagaaaacagaaattgtaccccttccttacaccttatgcaaacattatcttaagatggattaaagtcttaaatgtaaaacaccaaaccataaaaaccctagaagaaaacctaggcaataccattcaggacataggcatgagcaaagacttcatgaataaaataccaaaagcaatcacaacaaaagctaaaattgacaaatgagatctaactaaactaacgagcttctgcacagcaaaagaagctatcaccagagtgaccaggcaacctacagagtgaaagaaaatttttgcactctatccatgtgtcagaggtctaatatccagaatctacaaagaacttaaacaaattcacacacacacaaaaaaaaaccatcaaaaagtgggcacagaatataaacagactcttttcaaaagaagatatttggctgggcgcggttgatcaagtctgtaatcccagcactttcagccgtggaggcaggtggatcatgaggtcaggtgttcaagaccagcctgggccgcatggcgacaccgcatttctactaaaaacacaaaaaattagtaggatgtgttggcgggtgacctgtaatcccagcttctggggaggctaaggcaggagaatcacttgaacctgggtggcagatgttgcagtgagccgagatccttccactgcactccagcctgggtgacagagcaagactccatcttaaaaataataataataagtaaaataaatagaaaaagaagaaggagaaggagaagaagaagaagaagaagaagaagaagaagtaaagaagaagaagaagaagaagaagaagaagaagaagaagaagaagaagaagaagaagaagaagaaggggacctttatgtggtcaacaaacacaaaaaagagaaaagctcatcatcactggagactagagaaatgcaaatcaaaaccacaatgggataccttctcacaccatgttgaatggcagttattaaaaagttaggaaacaacagatgctggtgaggctgtggaggaatagaaacacttttacactgctggagggagtgtaaattagttcaaccattatggaagacagtgtggtgattcctcaaggatctagaaccagaaataccatttgatccagcaatctcattactgggtatatacccaaaggaatataaatcattctagcataaagacacatgcactcatatgtctattgcaccactgtttgcaatagcaaagacttggaaccaaccctaatgcccatcattgatagattggaaaaagaaaatgtggcacatatacaccatgaaataatatgcagccataaaaagaatgagttcatgtcctttgcagggacgtggatgaagctgggaaccattaacctcagcaaactaacacgggaacaggaaagcaaacaccatatgttctcactcatatgtgggagttgaaaaatgagaacacatggacacctggagccaaagatcacacactaaggcctgttaaggggttgaggtcaaggggagggagaaaattaggacaaatacctaatgcatatggggcttaaaacctagatggcaggttgataggtgcagcaaaccaccatggcacatgtaaaactatgtaacaaacctgcacgttctgcacatgtattccagaacttaaaaacaaactaacaaaagtgcactaagtctgagggggagtgggggtaagggcaggagtcaggcgagggtgggtgcgtcctggagttttatccagtcattgacactgatgtgggaaccgcccaatcaggcgcgcggtggcagaggagaggaaaggagggcgtggcttcctgcatttggcgggatctgtgtctctcgctggtgctggcacaggagcttgggatctgtctcctctttcgcctcctgcaccttgagagccctgggctactctgtcacagcccctgttgccctgcgatctgtaggtccttggggacgcatagttaaggtgccaggacatcctggaagctgggaaatggtgagtatacggggttcgccatcccgagaggggagaacagactgtgaaaccggcaggaccggcctccccacggttagctccgagtctcccgcagcttggccctcagtcccctgtggctgcaagatggccgctgggccagcagcgaggacccccacgtcccgtccggcccatccggtcctgtccctgggcagcgccctgctctgcgcccacagccatgagtatttcccaaattgttcagggaggccagatgggtcatcagggaaaaaccgcgagtgggtgtttgcgtgggaggagctgcggcccgtggggtccacagtctctcgtgttaaaaattaacgggagtctatgttaaaaggttcatcagtttatctgaacaaagagtgattggtgaaatggaaagcacccagccatgatttctggtccaccagaggggcataaaggaaaggctttcataagatgcatgagaaagcaacccaaattcaagaattggttccagttatatggtagccttatttgaactatccagatggaaatgtcctggttacatattcagaggttaattgcatgtttgtcatgggttaaacctgcattttgcttcaggctaagatagtgttttataggaaatatatttgagttaggttttagatttttttttgtttgttttttgttttttacctatgaacacagggcactagagccactttagactaattttctgatctttaattattttaacactccagaggaggactggttttctcctgtgtttttttaatgtatggcaagtggaacctctaatcgaccaccctgtttttcatcctaactcaggcttgcagtaaaattatcagttcccactttctttgctgcattctcaaacgcaacacatgagaccagctttcccttgccaatttacaatgctgttaactatatgtcctttattatacatttcgttaaagttttctattattgggtttctttctacttctccctacagttctggcaatatttgctttttatatttagaagcctcccttttgggtgcataaatatataaagctatattctcttgagaaattaacctctattattgtatggtaaactcatttcattcttgtgagagacattgctagaaagtctattttgtctaatttaagcattaccatttcactcctttggttattatttgcatggaatatcattttctatcctttcacttttagcctatgctcttaattcataattgagtctcttgtaagcagcatattatgaggtttaaaagattaatttatccactctgtctgctttagtctcttttggctgctataacagaatatcacacactggtaattaataaagaatagaattttatttgactcatgattctggaggctgggaagccaaaacaacattatactggtatatgttgaaggtctagttgctggataataacatacacaaagatgtgagggagagagagctttttttttttaatatataacagatccattcttgttataattagcccattcccataataagaacgttaatccattcatgagggcagagtgcttatagcttaattaatttttaaaggttccacctgttaattctaacatgttggctattaaattttatcctaaattttggagatgacattcagtgtacagcagtatctgtttagtagatactttaatctttttatttgtaaggtagtgataggtaagcagttactattgtacatttgtagttttctgtccattttaagtttgcttcttttttttctggttctgtctttcctgtggtattgttcatttttgttgagacaaagttatgctttcttgctcagactgaagtgcagtggcatatcacagctcactgtagccttaacctcctgggctcaaataatcgtcccaccttagccacccaagtagcttggactgcagacatgtaccacaacacccaaggagatttgattcttccaccttggcctcccaaagtgttggaattataagcaggagacaccatatccaatgtgtaatttttgttgtttgtgtatgctttaattactttctctttttctttactatttttttttcctactggttatcatgagacttatgtaaaacatcttgtattttaatagtctagtttaagatgataacaatttatagtattctgaaattcagtatgtatttaccattttagtgacatttatactttagtatttttcatattgttagttagcatttcatcatatcaatgtgaagatttcttccagaccatggctggagaaggaaagaaggtgtgttttgcctgattcagggactatagagagaaccaagttctgcaggcctgtcatctaagtctcaggtgagtatgaattctcttgtgttttccacagactgttgcagtgtcaggaccaaggtcaaatgagttatagccaagtctacagtaagatgtggcagtattctgttttgaagcgaggaccatgattggcaagcttgccacttggtcaagtgcttaccctctaaagatgtcttccttggtctttgcctccagctgggtgtcacaaactctgaactggattccaaggctttcatgaatgcacttatgtttgctgtggcagctgcattatgtcgtgggggatgtggatgcagaacctcccattctgtcgtcttgcttatgttactctcctttatgtttcactttctcaaatgaatgtcaagcaggtgattttcagattcaaaagttctaaaataaattgctcaaatttacacattatgtaagctgttaataaaatttcttgtaggtgctacatatttattaaaatttttggttgtaattttaagctcactgtaggcagaaaggaatcattaagatttctattcttttttagtctgtatctaaatgaccatatattttaattccaaatatttactttatacttcagtaatgctcattgtattttgcaaaatttatattgttcttttatttgaaaatataaggctttttttagctcctgaaatctatattatagtcatatagttttattatagtatttgataagaagagcagcaacatattgagaacagaataaaattctgctgtctttttaatgattatttattaaattcttctcattaaagcctattattaatgattgtaatgtatttactgtataattttactgcaatttattaaatgccaatgacttctaatgtctgcttttcatgactgcacacagtttaaagctgtagatatctaaagggttatttttcagcccggcacggtggctcatgcctgtaatcccagcactttgggaggccaaggtgggtggatcacgaggtcaggagatcaagaccatcctggctaacacggtgaaacccagtctctactaaatatagaaaaaattagccgggcatagtggcgggtgcctgtattcccagctactcgagaggctgaggcaggagaatggcgtgaacccagtaggcggagcttgcagtgagccgagatggcaccactgcactccagcctgggcgacagggtgagactgtctcaaaaaaaaacaaaaagggcttatttttcattgtatatttatgttgtattcaggattttatgcattaaaatctctcttcttattttcagttctgtgttgttgtgtttcttttctgggggggtatgttttctcagagcagttaattgtatttttgcttttaaagcttgatatcatgagttgaatgataattttttaactcggtacacattatgacaatgtgatatttaatttatatttgaattagctgtgtttgttgcttatagatatatctatgtgtttttcacctatgtaagtatgtcatttttttcatcttttttccttgtttttttttttaagtttcagatatgctttctttttcttttttttgttttttttttttttaaagagaattttaaaacagagtcaaatgaacaaaaatcagttatttgtcctcttgcagggcggggagaccttccttccccacgggtttgaggctatggctaagtggtgagccttggtgagacgcagaaaggatccatcccaggcacttggctagaggtaagtaaaaatagcctttgggccagaagacctgatagtttgggtactcgtctggacataagtccccatcttcccagaaatgtcgtcttttgtctgcaacaactggctggagaaatatttcagaaagatgtgtgcctggaacacccaaaggcatacctttcctttctccttggcataggccttgcagcactgaagaaagaccaggtttgcaacggagccttcaatactcttcatccctatggatctcaggggctcatagggtgacaggagaggagacaagctagcttgggaagagtctttgtccttcagcttctcctctactgaaacactatatacttggggccacagttcatagcaaaacacacatgctgtctttctttctctcacacccccatctcgggaacccaacaacttgatggcaggtagctctgggtatccttggtctggcattcacccactgggcatctaagctgtcctaaagctcttttcaatcacttctcactgtttccaggcccatgtgggtaggtgttccagccttcactctttcaggctgttcataaaggcacagtgtgggaaaatcccctactgtgatggccattgctgggaagcagggaaggttaagggcccactgctgcccaaggctagtgtagacaccctctgctcctccactcatctcctcaaataatgatatcaggtgcagcagctgctgtctggaatgttatcaaaccaggactgcacaggcactgcattctctgtgtggaagatgtaagaagcaggcgagttgtccaggatgagttttcctcaggtccctccccagatggctgacgtccttgacatagcagccctggtgaaacaaacatgactcatgggacaggcagccccagaccatcccatacccgtccagctcacccgtcacaggatctgcctacttgttcaggctgggaagaagagagcaatgacgaaaacacatttaaacatttcctccattcatgtcaggaactcatccatataaggcctcatgagcacatggatctggtgcatggtcccctcaagctctacaggcactaggcagtcagcattgctgattggcttaaaggagctatgcacaagggtttcatccaggtcagtgaccatacagatccttccttgatttttctctgtcacctctgggagcaggcaggttcctgggatctgataaaactgatattggagacgctggagctgatccgacatagcaatggtgttgactccctccttatgtgtggattgctcagcgggggaacttgactgtccaacatgctgggtgcaagaacagcagaaaggggacttttaagatgtggcaaacatgaggcctcttcggagaggactttggaaaccaggccttgcttggtaaggaccagggcatcttccctccatgcctgggtgatgatggagccttgttccatctaacaatcctgagggctgggctggggggcatgggctggggcctgattcagttcccgagattctgacctccacagctgttcacataccccttctcctttccatactggccgggaagggaggtggcttgtagggagggtggttggccttggcagcggctccccagtgtgcccccatccccgattcccccagcgagagcttcaagatcctcagtttgggtctaacatagagaatccaccagaaacacatttttttttcaagttttattttaagttcaggggtccatatgtgataaagtttatttttcaacttttattttaagtttaggggtccatgtgcagagtatgcaggtctcttacatacataaatgcgtaccactgtggtttactgcacagatcatctcatcacccaggtaccaagcccagcatccgcagctattcttcctgatgctctccttcccctcccccatgccatgaaacaggtgtccagtgtgtgttgttcttcctgatgtgtccatgtgttctcattgatctgcttctgctaataagttagaataataataggcggtgtttggttttctgttcctgcattagtttgctgggagtaatggcttcaaattccaaccatgtccctgcaagggacatcatctcattacattttatggcttcatagtgttccatggtgtatgtgtaccacatttcctttatccagtgtatcattgatgggcatgtagattgattacatgatgttgctattgtaaatagtgctgcaatgaacatttgtatacatgtatttttaaaatagaattatttatattcctttgggtgtaatggtattgctgggtcaaatggtagttctgcttctaggtctttgaggaatctccacactctcttcctcaatgcttgaaataatttacactcccaccaacagtgtaaaagtgttcccttttctccacaacctcgccagcatctgttttttttttttttactttttattaatagccattataatttgtgtgagatggtatctcattatggttttgatttgtatttatgcagttatcagtgatgttgagcttttcatgtttgttgggcacatgtatgtcctcttttgagatatgtctgttcatgttctttgacccttttttaatggggccttttttttttctcttgtaaattttgttaaattcctcctagattctggatattagacatttgtgagatggataggttgcataatttttctcccattctctaggttgtctgctctgatgatagtttctttggctccgcagaagctctttagtttaattagaccccattagtcaatttttgcttttgttgctatagctttttgcctttctgtcataaagtcttttctcatgcctatatcctgaatggtattatctagattttttcttctaagggttttatagttttgggttgtacatttaagtctttaatccatcttgagttaatttttgtacatggtgttaagaagggttccagtttaaattctctgcatatggctagccagttctcctagcaccattttttgaatagggacacctttccctaattccttgtttttgttaactttgtcaaagatcaggttgttgtaggtttttggctttatttctaggttctctactttgtttcatttgtctatgtgtctgtttctataccagtaccatgctgtttttgttactgtactcttctagtatagtttgaagttaggtagagtgacacttccagctttttttttttttttcttaaggttggcttggctatttgggctcttttttggttccatatgaactttaaaagtttttatttttctaattctctgaagaatgtcagtagttcaatgggaatagcattgaatctatgaattacttagggccatatgcccatattcatgatactgattcttcctctccatgagcatggaatatttctccatctgttttgtgtccactctgatttctctgagcagttgtttgtggttctccttgaagaggtccttcactttctttcttagctgtattcctaggtatttttttctctttgtagcaaatgtgaatgaaagttcattcatgatttgtctccctgcttgcctgttgtttgtgcatgggaatgctagctacttttgcacattgattttatatcctgagattttgctactgttgcttatcaccttaagaagctttgggcctgagacaatgaggttttctagatgtaggatcaggtcatctgcaaacaaagataatttgacttcctctctttctattagaatactctttatttcttcctctggcctgattttcctggccaaggcttctgatactatattgaatggtagtggtgaaagagggcattcttttcttgtgccagttttcaggtggaacgtttctagcttttgcacattcagtatgatattggttgtgggtttgttgtatatggctcttattattttcaggtatgtttcttcacttcctagtttattgagaattttaaacctgaaggaatgctgaattttattggatgctttttctgcatttattgagataatcatgtggctttttatttagttctctttatgtgatgagtcacatttattgatttgcatttgttgaatcaaccttgcatcctggggacaaagccaactccattgttgcagatgaactttttaatatgctgctggatttggtttgccagtattttattgaggatttttgcacagtgtttaccaaagacattggcatgatgtgttgttgttgttgttgttgttgttgtagtatctatgttaggttttggtatctggatgatgctggcctgatagaatgagttacagagaactttgtcttcaattttttttggatggttttaggagaaaaggtaccatctcctctttgtacctctggtcaaattcagcttgcttggtaggctagttattactgcctcagtttcagaacacattattgatctattcagggttcagtcttgtggagggtttattttgcaaggaaattgtctattctagattttctggtttatgtgcatacagatgtttatagtgttctctgatggttgttcttatttccatgggaccagtgatgatatctcccttattatttctaattgtgtttggttctcctttcttttcttatttatttgcctagctagtgttccatctagtttattaatttttttcataaaacagctcctggatttgttgactttttttttttggaagagttttcagtgtctctatctccttcagctctactttgatcttggttatttcttgttttctgctacctttctggttagttttcacttggttttctagttcttttaatcaagatgttaggctgttaactttagatctttctagtttctcttttttttcttgtggcagagtctcactctgtcacccaggctggagtacagtggcatgatctctgctcactgcaacctccacttctcagttttaagtgatttctgctgtctcagcttcctgagtagctgggattacagatgtgcatcacaaaaaccagctaatttttgaatttttttttgtagaggtggggttttgctgtgtgttccaggctggtcttgaacatctggccttaagtgatttgcctaccccagcctcccaaagtgctggaattacaggcatgagccaccacgcccagccctttctagctttttgatgtggacattagtgctataaatttccctcttttcttggtttccagtgattattttattctatcttggtgagtcatcagggaaataatcttaaatttacaatcaacatatagtttaaatccatataattgtgtgagaataaccctttgttatttgaaggtgatgtttgaaaggttttctaactgtgccttttagttagtcttaaatttctaattgtagttaaaaacatgccattgtcatttctgaaattttaagtatatggtttagaagtggttagtatagttctattgttttgcagtagcttttagataatttttgtcttacaaaagtaaaagtgaatactcattacttgtgaaagaagttagttagcttaccttaggtagatagcaagagaagagtccctggaaagtccctggtcagtgcctcatccctgcataacatgtaaagaagcctggaaaaaatcaagctgcagacactaacaagggaactaacatatgttgttgtgcttggagacatgcccgtggctgcagagatagaaaaacctctggcccatttggataaaaacttgtacaaacctccagctcactcagataaaggaacaagaacgacctagcacagaaatgcctttgtttggccagccacggtggatcatgcctgtaattccaacaatgtcggaggcagctgtgggcggatcatctgaggtcgggagtttgagaccagcatgaccaagatggacaaaccctgtctttactaaaaatacaaaactagccaggcatggtgctgcatgcctataatcccagctacttgggaggctgaggcaggagaatcgctagaacccaggaggtggaggttgctgtgagccgagatcgcaccattgcactccaggctgggcaacaagagcaaaactgcaaaaaaaataaaataaaataaaaaaagaaagtacatctcaaaaaaaagaaagaaagacaagaaaaagaaaaaaaaaagaaacacctttgtctttgtacagtcagtgggctcccaggaaaatgttccttctctttttgttggcatggacactgtggaatctggtacattccggtagacattctcctttatttggactgtaagtctgacctctatgaataattacttcagcccctgattgctcccgtgccaagctccttggccaaactttcaccttagcttctggtaagtcttgggccaagctaagcagcatctatcaatcatcccttcagctcctgattggtcctgggccaaaggcctgggccaagctgagccacacgtttttcaagacagcctgtgaactaggcacatatccttcccttcccagtccataaaaaccctggacccagcctcgtagagggcaccactttcagacacctatctctgctggcaaagagctttcttctcttgcttcttaaactttcactccaacctcacctttgtgtttacactccttaatctccttagaggtagaacaaagaactctggatgttatctcagactacgagagactgttacatcttggtgcactgctgagactatgacacttggtttctttgagtttgactaaatattttacatgagtgtaattatacagctttcctttttgactgtcttattttacttaacagaatgttttgaatatttgtccttattgtagtacttttcaagatttccttatttttaaggctgaatgctatcccagtgattgtacgtgccctgtttgctgaatctactcatccttaagggtacatttgcttccaggtaacatgtttgtgactaatactacaatgtgcatatatctattccatgttctgctttgtctgtttgggatatttttcatacactgattcagtaccatgtgtattcccttgcttttgttgtctcatccgttgatgttacgtcccccaaattattgccacgaccagttgtcatgaagcttcacccttctgtattgtgctaggaattttacagctataggttttacattatagtcttcattcattttttaaaattgacacatgtaattgtgcatattttggggaaacaattatatatatatgttgtataacaataaaaatcagagtacttctatacttgttgcctcatgcatttgttatttttgtggtgagaatattcaaaagcttcttctctagctattttattttatctttaagtattaaatttttttagagacaggatcttgctctaacacccagactggtgtgcagtggtgcaatcttagctcactgtaacttcaaacagtcttctaaccttagtttcccaattagctgagactacaggaagctgccaccatgcctggctaatgttttaatttttcatagagacagggtcacactatgttgtccaggctcatcttgaacttctgacgtcaagtgattctcctacctcagtctcccaaaatgtatggattgcaagaatgtgccaccgaaactggtctcttttagctattttgtaatatgagataacttttcattaattattattattctactgtgtaataaaaaacaaaaacttatttcccctatctaatcataacacaatacctgtgaagcaaccttttcccatcctcctgcttcagtctctggtaacccctgttgtactctttgcttctatcaaccctttttttcaggttcctcaaatgagtgagataataagatcataaagtatttgtgtttctctatgtggcttattttacttaacatggtatgctcaaggttcatccatgctcttttaactgacagaattttatgctttcttatggctgaatagtatttcgctgtgtatatatagtacattttccttatccatttatctgttgctgtacatttgaattgattccatatataagctattataaatagttctgtaatgaacatgggaatgcaaatatctttttgacacagtaatatcctttcttttggatatacacccagaagtaaaattgctggatcatataatagatatatttttaatttctttcagaaacctccatactattttctataatggccatactaatttacaattccaccaacaaggtatacatccactcttttttatatcctcattagttcttgatttatttatttatttttattatagccactctaatgggaatgaggcggtacttcattatggtttggatttgcatttccttggtgattagtaatgtagagcatctttttatgttccagttagcatttttgtatctctttttgacaaacatctattaagatcttttgcatttttaaagttagattataagtgtattttattttgagattttaaagtttcttatatattctgaatattagccttttgtcacatgtatatgaaaacattttctgtcattgcctaagctgtctcttcaaacttctagttgtttttttaatatggaaaagcattttagtttgacataatgttgtttgcttattctcgattttgttgcccatgttttgaaatcttattttaataatcctttccccatccaatgttataaagcatttttttatgtttttctctaatagtttcataattgatggcattacatttaagtctttagttttagttgattatcatatatggcaaggtacaagggtctagtattatttttctgcatataaatatttaagtggccctgcaccatttattaaagagattagcttttctctaaagtgtgttcttggcaattttgttgacaatcagttggctttaggtgcataaattaacttctgggcttattcggcacattagtctatgagtttgtttttatgccagtacagtgctgttttggttactgtagctttatagcaagttttgaagtttgatgaagtgatgcctttagctttgcttattttgctcaaagttgctttgtctattcagagttttttgtggatccatataaatttaaattttttttatttctgtgaaaaaatgtcattggtactttgataaaaatcacattaagtctgtagatcactttgggtagatagatcaagagtattcttccagtgtataaacacaatattttttcatttattcatttgtattttatattttttatccatgttttgtcgttttcagagtagagatcttttacctttttagttaagtttgttgctaggtgtattagttgggcttccctagagagatcatgagatcccacaataggttgtctgcaagtttgaggagcaaggagaggcggtccatgtcccaaagctgaagaacttggagtctgatgtttgagggctgcaagtgtccagcacaggagaaagatgtagtctgggagcttaggccagtctctctttttcacgtttttctgcctgctttatattcactgtcagctcattagatggtgctcacccaattaagagtggatctccctttcccagcccactgactcaaatgttaatctcctttggcaacaccctcacagacacacccaggatcaatgctttttatcctccaatccaatcaatttgacaccctgtattagccatcacattaagtattttcatttttgtagcttttgcatatgcagaagaagaattggatgaaattcagccttcattatgatgaaaactctcaacaagttaggaatagaaggtatgtgccttaatacagtaaaggccatttatgaaaaagcaatgctaactttatactgaataaggaaaagttgaaagctttctctctgagatctggaacaagacaaatcatccaaactttcagccctcttattcaacatagtactggaagtcctagccaaggaaattaggcaagaggaagaaataaaagttatactaattggaaaggatgaagtcaaatggtctctcattgtggacaaaataatcttatatgtgaaaaactctaaacactacaccaaaaactattagaactactaaacaaattctgtaacattgcagaaaattaacacagtagtagctttctgtatgatgatagcgataaaattttaaattccattttaatagctaccaaaaattagttattttgagtttatttctttatttgtggtggagtctttctctgtcaccaggctggagcgcagtggcatgatctcagctcactgaaactcttgcctcccgggttccagagattctcctgcatcagcctcccgagtgtgtggaactgcaggcgtgtgccaccactgccaactaatttttgtttgtatttttagtagagacgtggtttccccatgttggccaggatggtcttgatatcctgaccttgtgattcacttgtctctgtcacccaaagtgcagggattacaggtgtgagccactacacccagccttgagtttatgtttttatctggtgcaaggtaaggtctaactttgttattttttccttgtaaatttttattattcccaatactgtttgttgaagagactgttctttcctttttgtgattcttggaacacattttaaaaatatgtttactatacccatgaggacttatgtctggactgtctcatctgtttcatcattcatttgtctttatgtcagtaccaaactgtttttattactatatctttgtagtatgttttgaaaatagaaagcatgatgcctctgtctttatatttttttcccaatattttttggctgtttgtgataacttgaaattccataaaaattgtagaatattttaaaacttctgcaaaaagtttcattggtattttgatagaaagtatattgaatcagctgagggtcgtggctcatacctgtaatcccagcactttgggaggctgaggaaggtggatcacctgaggtcaggagttccagaccagccatggagaaaccccatctctactaaaaatacaaaattagccaggtgtggtggcacatgcctgtattcccagctactcaggaggctgaggcaggagaacagcttgaacccaggaggtggaggctgcagtgaactgagatcgcaccattgcactccaccttgggcaacaagagcaaaactccgtctcaaaataaatagaaagaaaagaaaagaaagaacattgaatccgtagaccacttttggttgtagtgacattttaacaatattaagtctataacctcttgaacaagagtgtttttgagaatttgttgtttaattttacttattctttgacatgctagtgtttttaacttcttgttttattgtatcatagttaggaataatttgtgtaattccatctgcttaaatttgctaagatgtgttttttaacttaacaggtggtctatctggaatattttggcatgtgtgattaaaagtattgcatattctactgttgagtggagagacataaatatgactgttaggtctaattgttctattgtgttgttgaaatcctctgtttacttattcatcttatgtttgttttttaatttacattactaaaagtctgataaaaaagtcatctactgttatgtgctggctacttcatgtttcaattctgtaaaatgttgcttcatattttgggaactgtgatgtaaggcacatacattactgttgcttttattgttgtatgttgttttattgttgcttttattgatgtatgttgttttttgttgcttttattgttgttgtttttattgtctttttcttcttctctcttgaggaagtttttgatataatatatattttgtctaccatgacaatatttgattttgcatttaattttttttattctttcatgtatggcttatgcgtgttccagatcataatgtggtcatttgtaggaagcagagagttgaatcttgtttcatgaatttatttagtgaaagtatgtttttgattgacataatttatatatataaaaaatcattactaaaagggaatgatttcctatgactttctattgaattttgtttcttttttgttttaggtcctgtagctttttcttttgagaaggagttttgctctgttgcccaggctggagtgcagtggtgcaatcttggctcactgcaagctccacctcccggattcacgccattctcctgcctcagattccccagcagctgggaatacaggcacccgccaccatgcccggctatttttatttttatttatttattttttttagtagagacagggtttcaccgtgttagccaggatggtctcaatctcctgacctcgttgatccccccacctcggcctcccaaattgctgggattacaggcatgagccacagctcctggcctgtcctgtagctattatttcctgtttttctctcttgttctctttcttagcgtattattgatttttatagtgacatgttttacttcttttctcactactctctctgtgtgtatgtctttgtgtgtgtgtactataggtatttccttttttttttttttgacagggtcttgctctgtcgcccaggctggagggcagtggcacaatctctgcttattgcaagctctgcctctcaggctcaactcaaacaatcctcccaccacagccttctgagtacctgggaccacagatgtgcaccactactcctggctaatttttgttatttttcatagagacagggttttgccatgttgaccagactagtctcaaaatcctaagtactataggtattttctttgttgttactatagatattaccaaaaataactactatagcatataaaaccctgcctctttatggctccctatgtgttttattgatgtcgcgaattacatcattttatattgtgaatctattggcacagttatatagtcatttttaagtctttgttatctcaactacatagcagaattaaaagtattctgtgcatcttcattataataacaaagaatattataattctgtacataattatctgttagaaaactttatattttacataattctatgttgctctcatcattattttattttttaatgtgaatgactagcattttttaatacaggcctagtgtgcataaattaatacagttttcgttgatcttgaatattctttatttttattttttaattcatttgaaatgatagctttggcagacatagtgttcttggttggtatttgccatttttttcagcactttgagtatgtcatcctacaacctcttgcctgcattctattggctgagacatctgctggtcatcctataggggtaacattgtacatgctaagtcattttttcttgctgacttcaagattctcggtgttttaacatttgaatctctgattaaaatgtgtcttgtcatgggtctccctgtgttgctactagttggtaaagtttcattaaattttaggccattttctccctcaaattttgagagttctcagccactgtttgtttcttgaaataactttgctgctctcttttctctctttttattttagaattcccattagaagtatattggccatcttaatggtatcccataagtcccttaggctttcttaatttttaaaattatttttaccctcctcaccatataatttcaaatgactttttatgaagcttgctggattttttcctgctagatcaaaccagttgttggaccttctagtgaatctctaaattcaggtattttatttttcagctccacactttatgtttctattttatacttttaatcacttcattgataatctcattatcttcatgaattgttttctttttctgtttagctttctatgttcttctttagctgaatgagcatctttaagctaggtgttttagccaggcacattgatatttgtgtctaattccagctactttgaaagctaaggcaaggggattactgtattaataaattctcatgcagctaataaagacataaccaagactggataattcataatgaaaaaggttaatggcctcacagtttcacatggctggggaggtctcacaattattggagcaagcaagagactttgttcagaggaatctccacttataaaaccatcagatcacgtgagacttttttgctatcatgagaacagcatgggaaaatcccacccccatgattcaattacctcccacagagtacctcccaggacatgtggagattattacaattcaaggtgagatttggttggggacagagagccaaaccatatcaattacttaaggctaggagtttgagaccaccctgggcaatattgtgagaagctatatgtaaaaaatatttttacagattaatcatgaatggtggaatgttcctgtagtctcggaagttggaggctgatgtaagattattccttgagttcccaggaatttgaggctgcattgagttataaccatgatattgtattcctgtctgggtgagagagtaagaccgccttttagaatttcaaatttgttttagatttaggaggtacctacacaggttttttacatgggtattttgtatagtgctgaggtttgaaatataagtaattccatcacttatgcagtgagcatagtactaaatagacagtttttcagttcttgatccctccctctctccaccctctaagagttgtcttttatttttatttttatgtccatgtgtacccagtgttaatttccatttataagtgagaacatcagtatttttgttttccatttctgcattaatttgattgtagaatgacctttagttgtattaatgttgctgcaaaggacaagtttttttgttgttgttgttgtttttgctaagtagtattgctgtacatgtgacactttttaaattcaatttagcattaataggctggacacggtggctgatgcctgtaatcccagcactgtgggaggccaaggtgagtggatcatgaggtcaggagatcgagaccatcctggacagcataatgaaacccccgtctctactgaaaatacaaaagttagccggacgtgttgtcatgagcctgtagtcccagctactcgggtggctgaggcaggagaattgcttgaacctgggaggtggaggttgtagtgagctgagatagtgccactgcactccagcctgggcaacagagtgagacttcatctcaaaaaaaaaaaaataccattaatagtcacgtaggttgattcatgtctttcctgttataaataatgcagtgatgaaccaacaagtgcatgtgctgttttggtagaatagtttattctcttctgggtatacacccagcggtgaaattctgcgttgaatcatagttcaactctcagttatttggaaaatctccaagctgctctccacagtggctgaactaatttatattcctataaacagtgtataagtggttttttccctctaaaaccccaccaatatctactatcattttactttttaacaaaagccattctaactggtgtacgatggtgtcttactgtggtttttatttacatttccttgatggttagtgataagcttttttcatgttgtttggccacttgtatgtattcttttgaacattgtctgttattgcccactttttcatggggtaattttttgcttgtgaattctttaagtttcttatagattctgagtattagattttgtcaggtttataggttgtgaatatttttgccattctgccagctttggggttagtttgtttttgtttttctagtttctctaagtgtgatgttaaattgttagtttgagatcattctaacttcttgatgcaggtatttagcactctcaactttcctcttaacagagcttttcctacaacccagacattttagtatattgtgtctcttcatttatttcaaattttttttaagtttctgcctcaattttgttgtttacccaaaattcattcaggagcaagttgtttaatttcaatgccattctgtgattttgtgagattttgttggtattgatatttatcttttttccattgtggcctgacagtatggttggcataattttcatttttaaaaaatgtatggataattgctttatggctaggaagtggtcaatcctagagtatattctgtgagcgatgagaagaatttatgttccttagatgatgtgtggtgtatactataaatgtctattagtttcaattgatcaagtgcgaaatcaaactccagaatttctttgttaagtttctgcctagataatctgacaaacactgttattggggagttgcgtttccctactattattgcgtggctacttgagtcttattgtaggtctagcagtacttgttgtataactctatgttccccaaagttgggtgcatctatatttaggatagttaagtcttcttgttgaattgaactctctatcgttatgcaatgcctttctttgttttattttactattaatgatttaaagtccttttttcttaaaagagaaacaattccaggtatggtggctcatgccagcactttcagactgaggcagtaggattgcctgagaccaggagtttgagaccagccgaggcaacataacaacattctgtttgtacagattcttttaaagaaactatacaggtgtggtagtgtgcccaactgtggtcatatttactcaggagacataggaggcatgactgctttacttcagaaatttgaggttacagtgagctgtgattgcaccactgcaatctgtcccaggagatagagtaagatcctgtgtataaaatgaaaaaataaagaaaaataaaatgattttaagttaaaaaataattcatagatctccacttctttagggtcacttgaatatatatttttctcgtttcattaggctatatttcctggttgcttttaagtactgtggttttgttaaggttttggtcaattaagaaaccactacctattttatcctttatgaaaaagctttgtacatgggaaaattgacaatattcagccacactagtcattccgggagcttctccaatctgttgtcaaaatgtgtcttctttgtactgtatgtattttcttgttaataaggtttacctctctttcctcttaggagcctttagtctcttctctttgtcactgttgcaggcactacagtctctttgttgtaagaaatatttatctttattctcagtcgacccaagctgtcatttaaactctatctctattctggtcaacactaaatgttaaaggtataaatcaataagtcagaagtttgcatacacgtttcactctgttttctttcccgagggagaatcatggaatggacagaattttatctaactgcactgttctgtagtgcagaaatgtaaccaaattttctttcttctaaatgtggttatggttggcttttttctcatgaggggtgctacaaactcaactggctttgctcacccaattgcagttaagttcatacatccattgagagaaacaggatctcaggttcttcttcaactatcattgtgttctcagctggcctcattttgttcattagatttataaaatatatttaccttaatttcatcaccgaattttttaaaaaattattattttccagctcttttagcattatatccaacaagacccagacaaaacagtacataggagcttcttttcaaaaagtaatattgggaagatatgggagctctggccttgaaaatttacacttaaggagagtgggaaattgaaggataagtgtaaagggtacaaaggatgctatgatgaatataccagatatagagcaactacctacagcaaaaatgtcactgctagaagagctcaaaaccataaagtattttggaaaaagcataattaatgttgattcttttttctgaactatatatttgtataattacatatcaataacaatttttgaaacatcatgtttttgaaacaaaatttagaaaatcgcaatagtggcctaggccaggaatatatcttctaatgctatccctcccatagtcccccacttcctgacaggctccagtgtgtggtgttccccttcctgtgtccctgtgttctctttgtttaactcccaactatgagagagaacatgtgatgtttgcttttctactcttgtgttagtttgctgagaatggtggtttccagcttcatccatgtccctgcaaaggacatgaactcatcctttttatgactgcattgtattccatgatgtatacatgccacattttctttattcattctaccactgatgggcatttggtttggttcaaagtttttgctcttgtgcacagtgccataataaacatatgtttgcatgtgtctaagtagtagaataatttataatcatttggttatatacccagtaatgggattgctggatcaaatggtatttctcattgtagatccttgaggaattgccatactgtcttccacaatggttgaactaatttacactctcaccaacagtgtaaaagtgttcctatttctccacatcctctccagcatctgttgtttcctgatttttccaatgatcaccattctaactggagtgagatggtttctcactgtgtttttgatttgcatttatctaatgaccagtgatgatgagtttttttttcatatgtttgttggctgcataaatgtcttcttttcagaagtgtctgttcatgtcctttgcccatttttgatatggttgtttgtttttttcttgtaaatttgcttaagttttttgtagattctgcatattagcccattgtcagatggatagattgcataaattttctcctttctgtgggttgcctgttcactctgatgatagtttcttttgttgtgaagaagctctttactttaattacatctcgtttgtcaattttggcttttgttgccattgtttttgctgttttagtcatgaagtctttgcccacgcctatgtcctgaatggtaatgcctttgttttttggggggtttttatggttttaagtcttacatttaagtctttaatccatcttcagttaatttttgtataactagtaaggaagacgtccagtttcatttttttgcatatggctatctagttttcccaacaccatttattaaataaggaatcctttccccattacttgtttttgtcaggttcatcaaagatcagatggttgtagatgtttgatgttatttctggggcctctgttctgttccatttgtcaatatatctgttttggtaccagtaccatactgtcttggttactgtggccttttagtatagtttgaagatagctagtgtgatgcctccacttttgttctttttgcttaggattgtcttgtctatgcaggatcttttttgattccatatgaaatttaaagtagttttttttctaattatgtaaagaaagtcaatgggagcttgatggggataacactgaatttataaattactttgggcagtatggccattttcacaatattgattcttcctatccatgagcacggattgtttttcatttgtttgtgtcctctcttatttccttgagcagtggtttgtagatctccttgaagaagtccttcccatcccttttaagttggattcctaggtattttattctctttgtaacaattgtgaatgagagttcatgcatgatttggctctctgtttgtctattattgtgtataggaattcttgtgatttttgaacactgattttgtatactgagacttttttgaagttgcatattggtttaaggagattttgggctgagacgatggggttttctaaatatacaatcatgtcagctgcaaacagagacaacttgagttcctcttcctatttgattacgctttgtttctttctcttgactgattgccctggccagaacttccaatactatattgaataggagtgatgagagagggtattcttgttttgtgcagattttcaaaaggaatgtttcaagttttttcccattcagtatattggctgtgcgtttgtcataaatagctcttaatatgttgagataagttccatcaatacataattcattgagagtttttaccatgaagaggtgttgaattttgctgaaggccttttttgcatctattgagataatcatgtggtttttgtcattagttctgtttatgtgatggaatacatttattgatttgcatatgttgaacaagctttgcatccgagggattaagctgactagatcgtggtggataagctttttgatgtgctgctggattcggtttgccagtattttattgaggattttcgcatcgatattcatcagggatacgggcctgaaattttctttttctggtgtgtctttgccaagttttggtttcaggatgatgctggatgcataaaatgagttaaggaggagtacctcttttctattgtttgaaatagtttcagaaggaatggtaccagctcctctttgtacctttggtagaattcggctgtgaatccttctggttctggacttcttttggttggtaggctattagttactgcctcaattttagaacttgttattggcatattcaggcattcgacttcttactggtttggacttgggagggtatatgtgtccaggaatttatccatttcgtctagattttctagttaatttgtaaagagttttttataatattctctaatggtaatttttatttctgtggatcaatggttatatcccctttatcatttcctattgcatgtatttgattcttctcttcttccttattactctggctagcagtttatttatttcttgatcttttcaaaaaaacagctcctggattcgttgattttttggacgggctttttgtgtgtctatctccttcagttctgctgtgatcttaattatttcttgtcttctgctagcttttgaatttgtttgctcttgcttccctagatttttaattgtgatattatgatgccgattttagaccttttctgctttctcttgtgggcatttagtgccataaatttccctttgcacactactttagctgtgtcatattttaatttttaagccctcaatctttctttttcatcatgacagtcttgactgttttatgtttatgaaaactgtaaaattgtctacacagtttttacaaagactttaccaaaatattttattgagaatgtacaaacctgtcagtcaattaggggagaagttgcattgtagtaataaatagccacaaaacaaaaccctgaaggacatccaaaccagaataaaacaaaacattttaacaaagagaaaaagaacaatctcgcaacaaatatgtgcagtttatatcacaaagatgttcacatctccactttaaagagagcttttagaagttgatttaaaatatgggaaaagacattatcccacaccacagaaaaaataaatttaagcagctcttaacacatgaacgtattatcaagctcagatggaatcaaaattaaatatttgacaacagattctacagtttgagagaaatagaaaagtgtttttttcttttctccaggtccacaagtctagtttcttggactctctcactataatggaggttgtcatcagctccccaaaataagggaagcacagagcagatggtggctgaaggtggggaatcctgtgaaatcatatttaagatcatagcccgtggtccattgtattgtaatcagctggctcaggaaagaagatctggatctcctgagctctacacctactgcaatggatatgtcaggagtcccgagaacctctggggcccaaacccctcccaccaaaatatatcatccagtattgaggactctgacaccaaattctcacagagcatatgcttatgcaattttacatttaatttctcattacattacaattgggaaaatgaggccccaaaagaggcagggactgatccagatctcaggaggtgggcaggctccagagcattagagagagctccagcttcctaggccttggctccatcccacctatcaggtttgctttggaagttagagcctgtagcttcacattcaggggcacagagaatgagcagatccagggttctgttcacatggggacctctccatgtcaatttcaagatgacaggactggggttttgcatccagctctgagggcacctggaagtaaaatgagctatgctccacctcagcctaatgtagagaatgcctgcaggaaagcctgttttcttcctcataaatagggctgtttgaactgggtgacctcgacgatttcacatactcataagtgtcttccagccctgattcttgctctgagactgtgcagaaatgcatccactctctgtaggtccttcaaatcagagggaggcatggccacttcagaggcatcttgggtagatgaagatgagacggagctaaatgttccagagcattggactctgaggctgaagtccacggaaaatcccagctcctgttgggttcttaaggtcctcatttgaaagtggtagaaactaatttcactggataaggggaggatatctcatggataaatagcacaacccaaaaggtagaggcaaatagaaggcaaagggggattccaaggtcactcattgtacttggggccttcagattctgctactttatcccctaggaccttgaagaaccagtgtcttgaggacagaaaaatcaagatacctgatttgttccatagtgctcctgcattgggccatagagttagtgatggcctggaggtggttacagccagctctgtttctggtgcccactgagctttgctggagcagctggaacaagtaagagtcacacatctcatgttgttatcaatgatctccacattatcaggtggtcaaaagaggaagggatattagagatcctccatataatcacttagccagtcttttttcccttgcgctcaccctttgccagctaaccaggtgggtgcaacgtggtacagaaaattattacatgatgcctgcaccccccaacccaggaccaaacattctgaggacagctggataaaagcactaaagcaagtatatgtgaaagaaaagaggaaggactataatataaagtggaatgttgagaagaaaagctggaaaattattgcatgggaggaactaaggcctcattgtggtgatgtttaatccatgataaggatgacaacagggagacatctctgcacaagtatgtgtcagggagaagccacccttagtgaagagactcataggtgtgagttcggcagaggttagaaagtttggctgcagacagcctgaggaagatataagtagagggatggagaatcctagggcctgggagatgaggttagatatctgctcctttctgacaacattgccctaaaagtcagcacttttcaacaacatataatatctcataatttatgtggaccagaatctggacacagttcagttgggtacctctgcctttaggtcttttatgacattgggactgtggtcttaactgaagctggactgggaaagcatgagcctttaagctgactcatgtgaaaattggcagggtttagtgtggctggagagcctgactttccttctctctactggtctgagcaccccctcaggctctgttatgttggtctttacatggagcatctcatagcattgaagcttgcttcctgtgtttgaggtatacaatagagagagagaattagacaaaaaggtgtacacaaaaagagacagagaaagattgagggcgcaaacaggaaaaacccagtaggagaaaaatgagagctttagaaaaatcttgacagggtgcggtggctcacacctgtaatcccaacactttgggatgctgagacgggtggatcacctgaggtcaggggtttgaaagcagcctggacaatatggtgaaaccaccgtctcttctaaaagtacaaaatgagcaaggtgtggtggtgcatgcctgtaatcccagctacttgggagactgacgcaggggaatcatttgaacctgggaggcgaaggttccagcaagccgagatcacaccactgcactcctgcctgggatacaagagtgaaactgtctcaaaaaaaaaaaaaaggaaacaaaaatcttgagagttccaataatttttctcctgtatttatgttaaaattgtaacccccgttgtaatgctatacggatgaaagatgtacttaactcctgagggtgggaccttcataatagagattactggctttatacaaggaaccgcagagggctctcttcctccttctgcaaaatgatggtaaaacttgaagtctgcagtctgaaattcagaagcgagtcatcaccagagctcaaccgtgctgacaacctgatctcaaatttcgaacctatagaagtatgagaaattaagtcctgttgtctataagctgcttatctatggttctttggcatagcagcctgaactaatacaaaagtgatatccttttctgtatttcattggacagaagctgaatttgtacccctatgctgttaaaaaaatgacttaaaatggattttcagaatgaaagataggaaatggcttgttgaaacactaaaatgttatctgcttataagatttttaaacattggctgaaattgttggaactgatatggccaaatgaagtccatgaagaatcagattgcatatgttagagcccaaatttccattgtgtgtttcatactaactctccctgaatttgcatgtgacttgagaggaagcaagaagagatgacagtatatgtctcatgactttccatattcctactttccttccagcaatcccttacagaacccacctcttaggccttttctaatcactgccttaaagccagtataagaaaacaaatttcagctggactgctatctcctttttggccaacctacaacatgatattttcctcaaaacccaagggccatattactgtcatcaggctgtaggccattttattcaataaaaaactgagtcactaaccacctagtactgtgagattttgtgaagagtttccctgtcatagacgtgagaaggcacatggatatgattctaaatataaagagaaagcactagaaagttgaatggctgtattaggactttgtcatactgcaatgatgaagtacttgagactgggtaattgataaagaaaagaagtttaattgactcacagttccacataattgggagggcacctcagaaaccttccaattacagtggctgacaagtgaagtgagtgagagcatgggatgtaccagatgcttatgaaactatcagatctcatgagaactcactatcacaagaacagcatgaggagaacccgtccccataatccaatcatctcccctcaggtttctcccttaacacctgggggttacaatacacagagaagtttgggtggaacacacagctaaactatatgaatgccagaggacagtatctacatttaatttcaacttcatactggagcagaatgaaaatgaagcgcagtggagaagtgacattcccaagatcaccctgccagacccaggcttgtttgagttgtggcccatgctaccttctacatattctcctaatgcttccatctctaagtgtgtgcattatctacaggtaacaccacatgatttttatgttttatcttatatacatctaatacaatccctaggaagtagatgttagcatcatccccactgtgcatgcttggaggctggggaagcctcaaatacacagtgacttttattgggtcccagagatggtaagaaaaacaaggttatgttccagctgtctcttatatcctggaacccaggctgcatttagttctttccagggaattaaggggaagttgtgtttgcatacttgtgtacaaatgaagagttgacatggaagaggagactgagcaattagtagcatagtggggcttttgggtaggtcttacagaaagaagggacccagtagatggaaccttgaagagtttaacacactttcttggtgacaacccaacatcagttaagaaaccaggaacccacattcttgagacagctctgtatccacctctgttagtgagagatgctcaagagagtgagatgttctttcattgtgccctgaaatttctgagttttgactttacaaaggctcagtgtaaaagccttatctgaaaacacggatgtcaactcaggcctcatcattgatgcccctggctattggctgggtgcacctacaaataacacagggcagctcaggacaggccccagagccaggcctctcttgtcaactcatctgggaagtcccacaccatttcttagtaccatgagttgtatggggagcaagagggagggcactcttcttttactgaagcagattgtcaggtgttggaacccttgtgtacctgtcatgttcatacctaggccatagctggcagaataaaaagaagagggttggagaacgagtctgtgtactcagatgtgaattccaagactttaacttgtcctctggtttccttccttgctggagattcatacagattctccttatgtgcctaatctgaagagcagaatttcttttcttttcttttctcttttattttctttctttctttctttctttctttctttctttctttctttctttctttctttctttcttctttctttctttctttcttctttctttctttctttcttctttctttctttctctttctttctttcttctttttttctctttctttctttctttttctttctttcttcttccttacttccttctgtctttctttctctctttttctttttcttttttcctttttgaggaagcctcgctctgtcacccaggctggagtgcagagaaaagcagaatttctagtggaggtgtcacatacggtgaaaacaaggcagaccactgacttttctttgcgtggtttctaggcactttttacagagctgcattcagattgatgaggagcttcttgatgtggccaactcctccctctttttggaaaaagaccaggtgcactaagccagcaaccacagccagcaccgggctgtggtaagagcagccacataggggtctctacagacagaaacccgagaagaccgggacagacccagtacccagactccagtatgaaaactctctgggctgtgtcctatgatcttcccatgagtaactcatagtcttgatccagtggaatctggccttcattagtctcagtggcaagttggttatgtggaaagtctctgttcactcacttgggtgaataacagtaaagacctttctattgttttcactttacattaggccatgagtatttgtgcctgtagctgcagtttgtgttagtttcctaccccaggtatctcctgcagcatgcagcttcagtcctaccagaccctcaaaacttaaaagcgaacactatttctagggaggattttgcaggaaaatggagaaagggttacacacaaaaaaggttaaactactctatgcatgtttctgcaatgtgttatctcaagaattcatctctgtagcccatcagggcaggagctggtctctcacctgttgataatattccataagggaggttcttccccacagtgtttagtcttccaacgctggtatagcctgacatgatgacattctactttcatgttggtcatgctgcagggagaattctgtgagtgtcctaataggctggaatcacttgctaaggtgaaccccatctttggtgctcacttttctgttatcttataattagctttattctaagcaaatccatgtctattttatttatctgtttattaacttatttttatgtatggaaaaacacatttttttatttgcttatttatttagagacagggtctccctctgtcatccaggctggaatacagtggtagattggagtgatcatggctcattgcagcctcaaactcttgagctcaaatgattctctcacctcagcctcctgtgccaccatgccctgctagttgattttaatttgttataaagaaagtgtctcattatgctgcccaggctggtctcaaactcctgggcccaagcaattctctcatctcagcctcccaaagcactaggattaaaaacatgagccactgtactgcgctgtgcctacttcaaaggactgaaaataaaaaataaataaatctttgccaaattaaaaaacaaagcaatagtttccaggtcttagataaagacaattctctgtcatgaagaatgacagaaggcttatttagctgttaaaatgatttgcttatatttcaaagaagcagagaaaaaaaggtacatgtaaaagtgttccaggccactcatggtggttcatgcctgtaatctgaacatttggggaggccaaggcatgaggataccttcaagccaaatgtttgagtccagtacaggcaatatggtgaaattctgtcactacaaaaaaataaaataaatatggctgggcatgttggctcacacctgtaatcccagcactttgggagtctgaggcaggtggataatgaggtcagggggtggagaccagcctggccaaaatggtaaaacccattctctactaaaaataataataacaaaaaattagccagacatggtggtgtgcgcctgtaatcccagctactcaaaaggctgagacaggagaattgcttgaacctgggaggtggaggttgcattgagacaagatcatggcactacactccagcctagcccacagagcaagacactgtcttgaaaaaaaataaaaacaaaaataaataaagctagccaggcatggtggttcatgcctatagtcctaggtaattaagcggttgatgcaggaggactgctcaaacccaagaggttaaggttaccgtgagctatgattatgccgttgcacttcaggctaagtaaaagagtaagattctgcctcaaaaaattactaattaaagttttccagattacattgtttaagaaaaaggaaaagaaaaaaatcttttttttattttcaaatgggagaatagagcctctcatttctaatttgtattgccttctgcaaaaacttagtctaggcccatggtcttgaactactggacatctgaattttggtaggtgctggattcaggcaactgaggggtggccttgggcacactgtgtgcacataaaagaaagggtttgaggtgaactaaaaggtaaaagaggggaaggtgctattaagaaaccagaagtgagagactgtacagggttggtgggaggactggttcatgctacagacactgacccaggtgaaacttttctctgagttatttctatgttcatgcaggaagacgagattatgatcaggtggcacagaaatctgcgatggtgaaaaaaccaggttgccactgcagattcggtgtctgaagtagaacatatgccaggggtcttgtaggcacgtgtgtgggtttttggtgggaaagtctatgaggaaaggtaggatgggcaacaatcttgatgccaaagccttgtcctgagaggggcttgaccacgtcaacatgcagtgtgtatgttcagtgggtgaaaaacatgtggtggcttcaagttggcaggagggtagaaggcatctgttctcagaacttcttccctcagagtcgtcggtccttcttaccatgggaggatgcctggaaccacagggcagtgcatggcgtagcagcctgtgtgcagagcagagcctaccttccccgagacacctggagtctctctccagcaaaggcccccacattgtctttctccttacaacacttttgatcctaaatgtgtaaagttccctgaaaacccactgcttcttcaacacccatttcttgccccaaaatttaattctgacacaacttagagttcgcacagatcccacaaattcagggctaagtcccacatcacccctctcactgcagaggttagtcacatgtcccataagcccatctatacttctgagctactgcctataaatctgagactcccataaaccccttttcaagttaaataatttgatagagttactcaaaaaaactcaacaaataagtctaattatatttaccactttattataaaaatacaactcagaaactgacaaatgaaagagatgtctaggaaaaggaacagttgtgggtgaaggtaatcctggaaatagctatatttaaagaaattcccccattctttgtgttctcaaagaacagcttagtgaagagaaacgtgcttcccattatgactttgtggatgttcccccccccccttttttttaacctatcacaaagacggacacagattacaaattcctatttttaaaaatgaacaaccattctgtaatttagtcttcagtggtcaaaacagagtacttgttaacaaaactttgcttgttccccttcttccctcagcccctgaactttgactcacccacagcctcagagaacctacaacccatatttatacatatccctcctaagaacaggctgacttcaagatgaaacattatcttatctgggatctgattttgctaccctccatcctgtgcttcctttccaaccttctttgtaaacttattttctcctccctatgaaataaaacccttttccacctaacctttgagatcctcaaagatctaatcatttgtactttttccttgttacaacacttcttaagtaacttcttagacaaagtctataaacagtctcaggacaataacaactccattctagaaagaatatcccaacttttcttcaatctcaaccccaactgcatctgcctgtcaacttccagcttaccaaagctctgtatcttctgacagtgacaaaggctccttctatggttggtgtgagcagactttgatgtctgcagggcagacacccaggaataatcaactgggccttcagtggcccccttttgcagggtcaacgttagccttagcttttagtcaacggtctaagacttctacttaccagttaaagtcattcaattagttttcaatttaaaaaatacttcatgtttgaagaatccagcaaaaatcattcaaatctaaggtttaaaagagaggaaattatggtcgggcatggtggctcatgcctgtaatccctgcattttgggaggctgaggcgggcagattacctgaggtcaggagttcgagaccagcctcactaacatgaagaaacacagtctctactaaaaatacaaacttaaacgggggtggtcgtgtattcctgtaatcccagttacttgggaggccgaggcaggagaattgcttgaacccgggaggtggaggttacagtgagccaatatcgtgccattgcactccagactgggcaacaagagtgacactaagtctaaaaaataaaattaaaattaaaaaagaaagttataaggggcttacattttataactcaacaagaaaagccaaagtatctatccctttcagaaaataaacatgtaatttaattatgttcataacaaatcatttagtaaacaatcatatgtgaacacttccaggcggtgccaagtcccagctcctaaaacttagcgttaccctcaaacacccagatgacagcatatggaacagagatactcactatcagaagttctctgttttgaaaaaagaataactgatgtgataaatttatgtaatttaacaattaatctacctcacgtgcttgtaggtatgtattcatttcgtaccaccgtagtggaagagagactatccctatcaatacacctggtaacattcccaacagtaagtcgtgagattctgcttgaaatcacctctcagacaaataaaaaacagtcctgggaaatgtacgacactcattctgctaaagaaataggcaagtaacaatttttaacaagtgaaatatattactacttaattttattcaaaattcaccaacttaatgtgctttataaatattttcatgcctttcaagctctactgataaaacatagtttacagttaattaaaaagtgaagttaaagtaagtacaaaaacattttcaaggtgacaaaattagaaggtgacagtgccgattgaaacacagacatatcagacccaagggtcaagtcaagccattctattacttgggatattttccccactcacatctggttcagtgaagtgggtcatgaccatcctaccaggagtcgctaccctgtgctcctctgtgtccctgaggtgcattttactttgcaggtttttgcactgcctcactaggttgggtttctttgtcctttgaaatattttctctcccttcaccaatctgagaacattttttcctcaatatcagcatccatttgcctggcctgcaatgtgtctctaaggaatggaaactaagctttggggtaagaaaatcttaatgacctaatgggtttgcttttagcgcaagggtatacctagagattccttccaggcacatctcaaacaaccactccacagagaggctgcattcccataccttgggctgttccctgagaggagatgacacaagggatgctatttactagacacttcaagagtcatggccactgttggcatcttggggaatcctcaaacagttttgaaattcaaaaccaagaaaataacaggatggctgaggatgtattgccctgtgaagtttccaaaatgaaacctgaacccaaaggctttctgatggggtgtctgtgccaagagaagtttaaacaaaggggcacaaaggttttccgctttttatttattttttttacagtggggtgtcaggggattattctctgctttcatctcctgtaaaatgtttacaaatgagaaaaaatttttttaaatgacatccactgctttttgacaaaaagaagaattgaaatactgtgtctgaaatgtacaataaagaacagttgataatgttgtgaattatggaaggttagttagtgttggtgagtgtcaggaaagaactggaaatttaaaatctgattgcaagccagagttaggctggggcaacagggagttagatttgagtctctgcctgccacacatttggaaaatgcatgagaaaactagttcccttttggagtgttaaaataactaaaaaacaggtgattatgttgaggtggctctagtgtcctgagctctgagtggagagacaggccaaggcctccgtacttccaaaaagctgcccattcttctccagctgtgcacctgattagatagtttccactccaagacccatgattggatgtagttcaattccctaccctgccgcctcagaccatgagtgacatatgtgatttgacactgggttgaataaagcaagaattataggtttttcctggatccttttctggcagggcttcctctgtgaactagaaactggccctgcctgtaaaatatttgcatttacatttgtatgtaagattatttgtattaatgaataatatatatgtgttattcatatatggaatcaatataatgacaattgttttaaaatttcagatgttttactttcctggcacatccaggttttagagcaggcagcctgagatttcaaaagggaggcaattctctaagaaataatatgagaggcacaagtgaattttaaatattctggtaactacattttaataaatataccgggcatgcttccctgtgcctgtaggtcgaactattagggagactgaggtgggaggatcacttgagaccaggagtttgagaccagcccaggcagcatagagaaagccatctctacaaaaaaaaaaaaaaaaaaaaaaaaaaaaaaaatttgaaaaattagccaggcctggtggtgcatgacttcagtcccagctactcagaaggctggagctggaggatcacctgagcctgggaggtcaaggctgcaatgaaccatgatcacacaactgcactccagcctggctgacagagcaaaaccctgtctcaaaaaactgatctctggaaaggcaatttgtttttctgcaatgtagccaagcagctaagtatgtattgaagccatcctttaatttttaacagggcaagaaagctttctaagaccccgaactccagatatgcgatggggcaaatcctgaagcgtacatggctatctctcacagctaaagcatccctcacccctatccagcgcttcttacccctggcgcaagagaatcacctgcggggaggaaaactttcaaaatcccttaaacccaagttgtaaccgcacaactaaatcagaatccttggagctggatctgaaaaaaatatggttgaaagtcgtgcaggtgattacaatgtgtaggcaagccagaaaaccatggctttaacgagcagcttttgttagaaatgatttctccaatgaatgtgaaaacgtttgctgctgaattgtgacctttccattttacctgcttttcctgcaaagtatattttgcagacccaggctggcttctccttctgttcctggttcacccagtgccgtgtgtgctcagtgcatcctgtgcacgggtcactgtgtgccctggcctgggtgagcatcattcttcggggagaaccttgatgaaaacaaagctgcattccaaaaagttaaaaccatgctacttactgtgttgaagtaaaaattaaaagacccaggggggctcacccaaaagttaaaacataaataaataacttggaacattaacatacacctgatgatgtcctgagtgaacacgccccacttgaaaacaaaacaaaacattgctattattctaaaatattaatttaggattgttatgcaaacatgcactctttacatttttattgataaataacatgcatacagcaatataggcacaaagcatttagggaatgtttgatgaattattactaaataaatacacttgtgtatctaagaatcagatttgttcatgcccctgacactttccccttcccaaaggtaaccaagaccttaagagctaagtgtagataaactttgtcattttgtacaagtgttttattacagatcactaaaaacatacacaatacaaaaaaagtataacagaccagtcacccagctttaacagctgctagtcatgtgtcatttttgttttatctatacttccagccatgcccccacccccaatttcattattttttaggctttttggataaaatgtatattcattgcaaggtacaatgcgaactgtaaatagtagagagatggggttttaccatgttggtcaggctgttcttgaactcctgacctcaggtgatccactctcttccacctcgcaaagtgctgggattacaggcgtgagccaatatactcggcctgagaattcatatttctaataaagtacaaatccatagggcacatgacaactgcaatgtctatctacagtaaaaacagtttgatgaataaaatgaaaggcaattgacttaaggtgggaaaaaaacaatcaaagcatgggtactatgtgccatctgtaggagcatttggttaagaataacaaacaaaccagttttattgttttaataaccgaaattggcaaaatttctagtttttctttcataggaatgctcttagcaagaaaaaattttcatatggtgagagcaaaaatgacaaccatttgcaagtaaatgtcttatgaaattaagtagcagatatcaagctcatgaccttcagattgttacccctaactcaatcatttacatagcaagtgcagataattttcatagttccccattaaaattatactttactccccttacaaattgtgactgtttttaaataaagttcactaactaaaattttgtatatgacatatgataaatttcccttcaagtcaccttatatttacttaattgtgttagccagtgtctgtctacctcccaacaatactttgggattctccctccatttgcacaggcatcatagctggggaacagggattcaaaagacccaggctgttccctacatatgtttcctcctcagacatcagttaatcagtcaatcaagtcaagtgagagtggaggccatgtattccctcttattcttgggcactctcctccaaggaggaaaaggccaggaggtcctgttagaggatgcactctgagagcccgggctccctaaggtatgagagttctaaccagcaggtgtagacttttcaggagtgaggaatgaggcaggcattccaaacctggagcttcatcaccttttgtttcatctcaagacaattctgaggggctgttttggagcgtgtctggaaggtgaacgttgaagaagagtgtgggctttgatgtgactcagatgagatctttcatggggaggcaggaattcaatgcccagaatctgggctggtgtctttgaggtcagtaggttgcctctttgtatccaagtccattgttactaaattggaggctggagattctaaatggcttccagaccatctctctgattctctttgggagattgggtctgaaaaagacaatgtcagtatttttgggaaattctagaaagtctgcttggaaacctgggaagacctcttgcctagtgcctaaatattcaatgtgcagctctagccatgtagatgcttggtaggtatagagctgggttttcatttatatcagcaaaacctatgtcagagttgaagaagtagtcaagacaaagtgtcttggtcgcaggccggggaacatcttaaaagcaaacttctagcctgatgactcttggcaatgagtgttgggtcctggctaaagtgccttgaatgcagcatgaggccaatccatgaatccaacttccaatggagaaatgttaatattttttcagtttgaatcaatcagggtgaaattaccttgctattggtttgcttactttttattatttcatataaaatctaagacaaaatacattaaatgcttattgatatatgtatttattcttcacctggctcataatatttgcctaattttaaactttcttctattttgtaggtttcaacttatttcattgtaagatattgttaaatctaatacgggcattgtcacttttacaaataattttattttatttcatgtatttcctattcactttttacatttaaattatggaccatttcatcatataaaaagctccatttctattttaaaaataagtctttgggtttttttgtcttgtaatttccatattacatagtaatgagataaacgttaatgttttcagggtattttaaattttaaataattactcattatatccacgtgaaatttgtttttactgcatgtgtgagttggagaaccgttttcacttctgactcatctttactgtgatctcctcagaactcatacctcttgtagttgggagattgcagtatataattccaataaatggggcaaattcaataataacataatacaaatgagtttgaaagcaggacatgtcttcaaagcatacacaacatgggcctatatatgtacaacaataataatttataagttacagtttggatgggaattaaaagtacagaaaatttgttaaaataaattaaaatggagatcacgtctcaataatctctgagcagacgaaattagttaggtctcataagtgatctcaaccttgcttgatttgcaaatacaagcaaaacttaaatatttcttgtagctgcctatttaaaaaagagaaatgaagctcaaccaatcaggagtagccaacatccttatataaatagaaactgtccaacaagataaacagacgaacaaaaaacaataaaaaagttgtgctaccaccaatcaaatgatttttttgtttctacattttttcaataaatacttgcttcttactctgtcagagaagcactaaataacttttggtctgatattttataatttatcaattgctcttactcaaatagacacttggcaatttcattgtgtctcaaattactttttagcagaataaaataaactaggaataaacattacaaaaatgtgtacagaatatgagaaaaacatagaaagtttatgaaatatatgaatgtagacataagcaaatagacaatttgtatcatattcttaggcagcaaatctcaatattatcaacatcaattgtccttaagtttatttataaattcaattttgttcctatacagataccattaaatattggaagtacacgttactataaaatattatatagatgaaaacacacataagaatagacaagaaaactctgaaaaaaaagcaaaaaacaagactggcaagctctgtgaaaaatcttgattgattaaaaactcatatgtcactgaaactaaaaattcagaaatagaccaaagtgcctaagaaagtgtcatagttcatccaggctgctataacaaaatacctcagactgggtaaaggataaacaacagaaatgtatttttcacagttatggagtctggaaagtgcaagatcaaggcagcagaaaatttagtatatgttgagagccctgttccccatagatggtaccatcttgcacacgggacaagggcattgccttcaacttcccttgaaagagcactgattccattcatgaagatgaagaactcttggcctcaccacttccccaaaggccacacgcctaaaattatccacataggaatttgcaaagggacataaacattcaggccatcgcaacaaaaactacatgggggatggcatcattaatacttgaggtgtaaaaatgtgatgttcttatcgcaaaggaaataaatgatttattcttcatggcatataacaaaataaaggtccaaagaaaatattttttatgaagataaatctatatggtaaaaaactaagtgttgataaggttaaccctacaggttgcatcaggattttcaaggtttctggtgatgagcaaggccccagagtttcctcctgtgacatttacctggaagttgctcatgctgttattcaatttgaaagtagataatattgtttgtttctgttccaatatttactaaattcaaaataatatagggctctttatgcgtaattgtcaaacagtcattcagtcaatggtcctctgctgaggaagagcacagatacatccaaacacatatgatgttcctcaaatagaggacttctccctgtgcgggagtcacctatgttgcacttgatcagaggctttcccaggcgagcatttctctgcagccctaccacagacttaaccctggaaatctgactcagaaggtgatagatgaacacccaacctagcattctaatctaatggatcctctcttaataatcccttccagggatctgggagctttcctggattcgtctgccacacacagctaggctaaaacatttggatagaagctttgatcctcactggccctcctgccctgttctaccagcttctctagaagtatgcttctctaattgatcctgagagacccatctaaggctatctctctgtgccaatataattgatctcataaagtgggaagagaaacaggcaagagtccagctatgctagaagctgtgtctagggttccttatctgctttatgtctctgatttacctaaatattgacaaatacagattaatctctaggtagtagaaaaacagaaggagaaatcgcagttcacagaagaagaagaaaatgcaatcagtaattcctagagtcccgcttaagctcagccacagggtactaagtctcttcaggaaaaagcaatggttgtccatcatctgaaaaactgtggcgttgaaccatgggcaccgagagtgcacactgcccactagagttccatgcctacatcacagagagatagaatagtctcaaaggattcttaagagtaacgtggagaccaaaaggagctgaatccacagcctctgtcttaccgtctgttctaatagtatttccagactcttttgtgggctgcaccaggggttattcagaaagaaaaaaagttgttaatgtcccaccattccccgtagcttccgaggtctaagttgttcatttcccacgttccaggttgttgttctccctctatctctacagaatcagtgtgtctcattccgatatctataatctcacctttattctagtcgccctttacttttttctagacattttgtgtagtagagccaggtaaaacagatacaagaatatttacataaaacttaaccagaactaagttggagtcccataactgctgctaggctgggatgcaactcagaggatacaaaagccaggctggtctagaattgcaggtatgggaaagaaagacatttcacccaggaattattagcacgaaattccaaatttgtgaaatagattcctagatcccccaaacatttcatccttatcttggaggcaatctggaagagataatcccctttcagagaaaagcatacctaatcaacgaattatctaaccaacatgtgtggaaaaggagggaacatcgtagagttggcccattttagtcgatgtggtgaaaaatgccacgaagtcagagctcaattgacctcaaaagcctaaaaggtggcacagattagcttcaagggacacatggtatggctggagtcagatgactgttatgctgaagaagtcaacagtggtgactgatatctcaagaagtgggctaaaagtccacttctggttactctgctaggtatggtctaggaattcttcaaccatgagacagataggtcaactttcaccagcaaccccaagtctggtttgcagtattagactctgggttggacacagatttaggttcaatctgcagcttgattgtggtcactctctggaaaacacttaccatggacttctagatgagtgacccagttagatcagcatctggggttgtttccggtttgcagcccaaaagatattcagacagtctacactttccattgtagataaccaaacagatagaatatgtgccattatcccaaaccctgagttctgacctttgagaggagcaaccactcatgtcaggttctgtatggctggcacaggttaaacagccacagcggcccagtggacatcatgaggtttcaccttccctgactcatctatgaaccaggaccagtcatataggaaacactcagtaaattgggggccccacagagacagcagctttgcttcagaggatagaaggaggcacaaaatttcaaccagctggggatgccctagccctctataggtcaaacttagtttgtcaggagttctgtagcaagctctttgctgactttcaaatcagtgtaaccagtagtgtgtcactgagtccaaaaggccaaagaacacctctaggtggaagctaatcctttactggaggctccaaattttaaaatcaagattttcttgacctcaggatgaactgatcaatgcaaatctccccaaatattttcactaatccttaattggaaagtaagactccagattttttaaccttcactaaaaataaatatctgattttttttcacctgggatctatgtatgtgtgttggagcatgcctttactaatcagcataaagttacaactctccttgtgcctctattttctacttgtgcagagtttaaagtacacaggtgacagcttagggttttctgggtcttttgctaagcatgtacctgaccctgagcatccccatttccccatttctttgttgatctcaaagaccattatcacagtcctaattcccaggagcttttcctcctagagctttttggcatgattattcttagacccaactgatatcctttgttcctggtgaactggtagcttatttccatttaaatgcttttacaaacattaagctattgatttaagatttctgtgctttttaaattaagtaatgctactgttagctttccacagcaattcagggttataaaaaagggaagaaaataattattttataccaatagtaggaaaaagagactggggatgactatattaatagcagacaaaatagacttaaaaagttacaagagacaataagacattatataatcatagaacgtgcatttggcaagaagatagaaatagtttaaacacttacatacctaataataaaacatttagatatagaaagactaagttgacagaattaaagggacaaatagacagttctaaaataatagttgaagatgttaatactccactctgagtaatgaatagaaaaatgagatgaatgacaaattaggaaatagaggacttgactaactcaatgaactaaattgatctaacagatatatacaatatacttcatccaacaaaacagagtacacactcttctcaaatgcacatggggaattctccaggatgggctgtatagtagatctcaaattaaatcaataacagatgaaatgctagaaagtttacaaaattgtataaattaaacaactacacaattacaacttaaagaattacaaaattgtataaattaagtaaaggaagaaatcacggaagaagtaggaacatacagaggaagaaaaatgaaaacaaaacatatcaaaagttatgggaaacagcaaaaacagtgttaagatgaaaagtttgcagctaagatacatttaaaaagagcaaagatttcaaataaataataactttatcacctagtaaattagaaaaataacaccaaattagatgcaaaacaaagagaaagaagaaagtattgaagattttagcagagataaatgcaatagagattacacaaacaacagaattccaaaaaaccaaaagttcactctcagttcttcaaaaaattaacaattggcaaaacttcagctacacacacgaaaaattaacagcatattcacatactaaaatgagtaatgaaagtgggacattactactaattcaaagaaataaaatgtttaaaaaagtgtactgtgaactatgataggatgataaattggaaaacctagataaagtgggcagattcctacttatgcaagacttgattacaaagaaatacaaaatctgaatagatagaaaactactaaggaaatggaatcagtaattaaaaacctctcatgaagaaaagcccttgttttgttggcttcactggtgatgtagatcaagcatttatagaacaaaaatcctttccaaaatctaccaaaagcctgaagagagcagttccaaacttattccatgatgccagcattagctcataccaaagccaaagagactacaaaaacccatagactaatatcccttatgaacacggatgcaaaactactcagcaacatcctagctaaccacattcagcagcatactagcaagattacaccccatgaccaaggggaatttattactggaatgtaaggaagatttagcgtatggctggtttcagtgcaatggtgtttacaactaattgatcacaaccagaatagatttctttattctttttccagtctcactggttcacttagctagcctttcttaacaaaagttttagcatatgaaaaataatcaatgcatatgacacattaacaaaatttttagaaaacattatctcattaatacagaaaatgtattttacaaaattcaaaatattttataataaaaacaataaattacgaataaaagaaaaccatctttgtaaaattcacgtataaaaacccacagcaaactacatgttctagaggaaaagaccaaaattatttcgtctaagctcagaagacagaatgtctgctcttgccagccacttttattcaacactgtattagaagtttcattcagagaaattaaaaaagacaatgaaataaacttcatcaaagtgtgtacagaaaatatattcttttatgtagaaaatcttaaagattccacacaaaaaatattaaaattaataaattcagcagagtagtagcatacaaaatcaacatagaaaaataaactgtattttatgtagtaatacgaatgatctgagaagaaaattatgaaaacaactcaatttacaatagcatcaaaagaataaaattaggaagtaaccaagaagcaaaatgccaattattttgtgtagatattaaaaaatcaatttttaagtttatgaggaatctcaagggaccctaaattgcaaaaataattttgaaaaaaaaataccaaagttagagaagtcacacttaatgatttcaaaacttactacaaaattccaaaatagcatgctacaaatagactaatggagtaatatagaaagccaatataaataaaccctcatatatatggtcaaatgatttttatgggaaatgaactgcctttacaacagttagtgctggggaaattgggtacctacatgtaaaagagtgaaactgttcccttaacttataccataagaaaaaattaactaactcgacaaaaacctaaatgtaagagctaaaactacaaaattcttagtataaaatgtaggtaaaacatgtcataacgctggatttcgcagtgattttttttaacaggacacaaaaaatgcaagaaacaaaagaaaaataaagaggactctatccagaatatacaaagaacaattcagcaataataaaacaaaatacttgtttaaaatatgggcaaaatacttagacatttctttaaaaattatgtgaaatggctaataagtccatgaaaaggtgctcaacaaaactaatcattagtaaaatgcaaatataactccaaatgatatatcacttaatacacatcagcatagttactaccaaaagaaacaaaacaaaacagaaaatcacaagtgttggtgaggacgtggagcaattagaacccttgtacactgttgttggaaatgtaaaatgttgcagctgctataaaataacagtataataactaaaaaatgtacaccaaaagtcaccatatgatcccacaatttcacatctgggtatgtagcaaaagatgtgaaagcaaagacacaaaataatacacgtacacctaggctcatggcagcattactcacatcacccaaaaggtttgtgaattacccgtgttgtttgaattatcatcaatgaataaataaataaaatgtgatttatacatatattggaacgttattcagttatgtaaaataagaaaattctgacacatggtacgttatgcatgaaccttaaggacattgtgcaaagtgacataagccagtcataaaaggacaaatactgtatcattccacttatgagatacttagagtagttaaattctagaaatccaagtagaagagtggttcctaggagctggagggggagtaacagggagctgttatttaatgtgcattaaattttggttttggaagttgaaagaaggtccctatgaatgagaataatagttgcaaaacaatgtgagtgtagttaatttttctgagctgcacacttaaaatagctaaaatggttaattttatgtatactttgccacaatataaaaaatattttttaaataaacaaactatagctatctgcaataggatgaattaatatcataaatataaagttgcatagaagaaagtagatgtaaaagtatacatgttgtacaatttcacttatataaaatccagaaagtgaacacaactgaggttctggcttccagtaataatgaagtagagtagattgttcaataactgtttcacatatactataataaagtttaataaaatactatattttgctatatagaaaggcacactgtttagaagaactgaatgaagattttagtattgccactgtagaagagataaggattggggtttgcatctattcaaattaactccctcataaaataataattttcaaagaaatacaacagaagccagagtccctgtaattcctatcacacaatttaaaaatttatgagatgcgtgaagaaggatgaaaatgtaatcgattcacaagataaaaagcagacaatagaacctattctcaagatgtgcaagatgctgtaatcggtaggtaagatttgaaagaagctatggtaagtatgttcatggggttaaaggaaaacagtctcatgacaagtgaacagatgtgtaactgtgcactcccagtcctttggtcacagggctgcaggactaaggaaggaaattaaagaaaaatgaaattaaaaggaaagagaaataagttttcttgtattaggctgatttgtcccagaggcagcaataggcacagcccagacccaggaaaattcttgataatattatgtaatgtgctctggaggttctcccaacactcccccaacacagggaaaagaaaaacaaattccctttgttttatggaatgagtttatagattcttgttctctgtaactagtgacttcaagtattgtgttttatcgaagaagtacaatgaaagtcatgagaagcctgagtaggctgaactacagctgtttgggaaccatagtgagggttataggataagcccatgcccagggaaacctagataatggacatgtgggttgcttggcaacggtcatgtgcaatcctgtctttgtcctgcctctgtattcctgctttcacgccactgtaagctcgcttcaagctagcccaccaccttttgtgaagtgtgtataaaagtcaggtgttgtctgtgttccgggcccggtctttttgacgtgagtcagctggtcctgagtgcactcaataaagattctcctgtttcaacctgaggtctgtctcgtcctcctgaatcccgcaacaggagaattccagtatgcaccatgttcagggaacagtgcgcgtcactgaaggaaaagtggggcgggagggggtggtgcatggctgtgagagcctcttgggcttgctgggagatgtagtcttataaagactcccagcccctttgtcacagggctgcagcaccacaatcccagcatacaacggaatcagggacagtgcgcgtcgctagaagaagaggtagagctgtgcataactcgctgggcttgatggaaaatgtaatctcatgaacactccttagtgaacagtgagcgtcactggaggaaaaggcggggctgtgcaggccttgctttagttgctgagagatgcggtctcataaacactcccagccctttggtcacagggctgaaggactacatttccatcatgcaccgggatcagggatagtgcgtgtgcctggatgaagaggcaaagctttgtgtgcctcctttggcttgctgggagatgtagtttcataaagtcaccagacctttcattacagggccgcagaactacaatcccagtatgcaccaagatcaaggatagtgcgcgttactggaggatgaggagggattgtacacgtctcgctgggcttggtgggatatgtattctcataaatactcccaaacctttggtcacagggctgcaggactacactcccagccagcaccgggctcaaggaaattgcgcgtcactggaggaagaggcggggttgtttgttactcgctgggcttgctgggagatgtattctcataaatcctcgcagccctatcatcacagggctgaaggactacacttccagccccagcatgcactgggctcagggacagcacacgtcactggaggaagagggagggctgtgcgcttctcactctgcttttttgggagatgtagtctcattaacactcctagccctttggtcatagatcgccaaggactgcaatcccagcatgcacccagctcagggacagtgcgctagtcactgcaggaagaggcagggctgtgtgcacctcctgggagtactgggagatgtattctcataaacactcccagctctttgctcacagggctgcaggaatacattcctagtatgcacccagctcagtgacagtgcgctagtctaaggagaaagaggccgggcagtgtgcgccttgctgggtttcctgagagttgtagtctcatggcctctccctgtcctttggtcacggtgctataagactacaatcccagcatgcttggggctcacggacagtctacatcactggagaatgaggggaaggttgtgtgcacctcgctgcacttgctaggaaatgtagtttcataaagactctgagaccttttgtcacgggactgcaggactccaatcccagaatgcatcaggatcaaaaacagcatgcgtcactgggaaaagatgtggggctgtgtgcgtctccctaggttttctcggagatgtagtctcgtgtcctctccctacccttggctcacagtgctataagactacaatcccagcatgcttggggctcacggacattccccttcactggataaggatgggaaggttctgcgcacctcgctgcgcttcttgggaaatgtagtttcataaagcctctcagaccttttgtcatagggctgcaggactacaatcccagtatgtatcaggatcaaaaacagtatgcgtcactgggaaaagatgtgggactgtgtgcctctccctacgttttctgggagatgtagtctcataaacactcttggccctttggtcacagggctgcaggactacaatcccagcatgcagcgagttcagggactgtgtgtgtgtgtgtgtgtgtgtgtgtgtgtgtgtgtgtgtgtgtgtgtgtgtccctggaggaagacgtggagctgtgcgtgcctcgctgggcttgctgggagatgcattctgataaccaatcccagccctttcatcacatagctgtaggactacaattccagcatgcacggggcaccgggacagttcgcctcaatggaggaagagaaaggggtacatgcgtctcgctgggctttctgggagatgtagtctcattatttctcccagcccttttgtcacagggcttcaggactacaatcccagcatgcaccgtgctcagggagagcgcgcctcagtggaggaagaagtggacctgtgctcttctcgctatgctttttcggagatgtattctcacacactcttagccctttggtcactgggctgccctttggtcacagggctgcagcactacaatcctagcatgcatgggactgagggagcatgcgctaatcagtggaggaaggggcgaggctctgcacgcctctctgggcttggtggaagatgcagtctcataaacactcacagcccttttgtcacagggctgcagcgctacaatcctagcatgcaccgggctcagggaaagttggcgtcactggagaaagaggcagggttgtgtgcacctcctgggcttggtaggagatgtagtctcataaacactcccagacctttcatcaccgggctgcaggactacaatcccagcatgcacccagctcagggacagtgcgcattactggaggaaaaggctaggctgtggacccctccttctgcttcctgggagaggtagtttcatagagactcccagaactttcatcacagggatgcaggactaccatcccagtatgcactggggtcagggacagtccgcgtcagtggaaaaagaggcggggctgtgtgcgtcttcctaggcttgctgggagatatatgctcataaacactcccagccctttggtcgcagagcttcaggactacaatcttagcatgcacctgtctcagggacaatgcgtatcactgggggaagaggcggggctgtgtgctcctccctaggattgctgggagttgtattctcataaacactcccagccctttggtcaaatggctacaggactacaatcccagcatgcgccagtctccggggtaaggcatagccctggaagaaggggcaaagttgtacatgccccacctaatatgctgggagctgtagtccgttaactgctctcagcctatttgtcggtgggcttcagaaccataatctcagcatataccgggatccggggtgcatagacctggagggagggacagagcggtgtggacttcccagtgtccaaagcattgctgagttcttatgctatgccgactctttgccacagagagtgagtacagaggtggacctggaggacaggtctgggctgagcattgaggagggtattaccctatgtaggcaccttacctttgcccaaatcaggcgggttatcctcacccgattggccctatgcttctcaggttcctctttcagctgcacccagggttccttccagagcattgcaccttctgcagctcagggcactgccttttttcctaaactactgtggaaactgtcctgatgtctgagacactgtccattgtgcagcagccctcttttttctctagccagagcgcgtgctcaatggcttttgagagaaatcttccacatggcctgcttgtgaacagcttcagagctctgcaggggctgacaagggctgagccttcctggaaacgtcactctcaatggcgcctttttcacgaatgtgaaagtcgaggcatcaggaagttagtttaatgggttgcagaaaatctaagagcaagggagaaaacccgctttccaaggcgtgagttttgtgagccattttcatcaacccatttaagtggacaagctccaaaatgtaacctgaagctgctatttaggcattttacaattaaaatcatcggtctcatcccaagtcgtgcctcacttgccagtgtctcagagacacaaatgggacctgatccctcaggaacagatagtgttccaggttcgtgggagcgacttttaagttgtggagcacttggggtcgtttgaaacccactatcttcagtagggacttttacgtctagagagcatgtgcattttgattttatctgtcttcaagctgaacctttgctcattttaacaagtaaaaacacattcctgggtgaaatgtcattgcatgctaatgagacatgaaacatatgcaaaaatatgtacagctactgcacatgtgcacccagaagaccactcaaagcatgccttctataacacttctttccaccttcttatgaataatcatgtaaaactcccagaaagagggtttctccagcaacaattaatgctgtctcactcttatgagcaggctgccctggaatctctttctcagactgtaccgtctattctgcacttgattttcaacgtattcttttcttttttgtgtgcaataaattactctatgctgtacttcttttgctgcatgtttcctgtttaaattcttttaagctaagaagataagaaccaaggtattacatcagccatcaacatttcttttgccatggcccggagagaggtttgtctgcttcattaatttcagtttcccttttcttgcagtgaatactatggcacttccagactacctggttaactatcgctggttgttccagcgctgtttcactaaagttctgggggaaacgtgtttaaatcacctatattctctagagagagaatatatgtctgctctccttttggctgctgcatctgtactatccataaatgacactcaccgcatgggttgctctcaacatttcatattcgggctagtttgctgcttagtttcacatctttctggccacacttcagactcagcttatcgtttgctgtcccttcggcaatactcgatcgccacctagtggctattgtactttattttctgatcgggttttctgtttacagttttgtcttgttttgttttgagtggaatattaagagaaccctgtcccttcaggctttatgcatttcccacctccttgaaattgttcttcaacaggttttctttgctgaacaaacgactcaaagtcatgtagatgcccggtcgtggggtttgaatctgagcattgcaggtgttataattcggcatcataaattgcaaaccagtaaattagggaaaggcttgtcagccagacatctgccccccagccagcagtgggggtcatctcggcagggctggagatgtgcagcgctggtgagagataggatggtgtatggcacatgcctatgacctcctagagcttcagttaatggggtctcgcggggctgtgctggacaccttggtggttccacttgtcccattgtgatgcccatggcctcctggactttagtacatattctgacgttgcaagattctgtcggcaccgtgggagccgcttcctctactgtcattgaaacacccctgggatgtatatttaaaaattgaaacagcttttggctagatgaaccaaaaaaaaaaaaaagaaaagaaaaaacttatcttcttttgtaatactatttagcttgcatacagattagctcacaaaacatggctggggaatgagactgtgaactttaacaccctcctacagctagatcttttctgtagaaatcagggaaaatggtctgaaatatcctatgtgcaaacctttatggcctgacaacaaaacccagctctatgcagcacctgtgggctaaagcctagtaagccacaaagcccctcagaagcattagaagatcatctcttattaatgggaagggaccccagacccaacaggccaacaccagctccagatagggaccctcaggggcctacacctcctgtagaatccgcagcatccccacactatcagagtcttctgtagaatctaagcttgtttcacctcctccttatgctcctctctatcagcctttgccaggtataatagtgaccagcccagctgtagttactcgcggtggaacttcaccccatgcagggccagagaatttgatccccttacagaaagtcccaaatggagagaggaccatcagagtgcttgttctcttctcaataaatgatctaatccaatgcaagcaacagctctgatggctcccaaagaacttcagcgcatttactgaagccttccaggctctaactttgaccaccattcaacttcaccatccataaatggacccaatgactgctgaccacgtagctgcagaaaacttttgcttattggcaaaaaatagaaaagacttaaaacttttgctgctttcaccatttcaatgcagaattcctttgcagcacaaatgtcaccataaggtggatccttgggaatccagtataaactatctcagaaaatctcagtgtgtccccaacaggcagcagagggcctcaatagacttcaacaacatctggactccatggccactgtagtccgacaaaaccaaggagcctgggatcttctcccagccgggtaaagaggaacatgtttatatctaaaagaagaatgctgtttttgagatcaatcagtctggtttagtcgaagaaaatattaataatatcatcacccaggcagacaaaattgaatctctaggaacttccatgggaatatgaaagctatgtccattgtctgccttgctctctttaatagtacccgtcattattatattttcaacttttacttttgttccaattttgtttaaaatgttaactgatttcttgctctcttgcttacggcaactccatgtttgcatgatggttttgcaaggctttcaacctttggttgccaacatcttcccactggttccacgaacgacatggtttacaccctgttagatcacacaggaagaaactttaaggcccaggctaggcagaagtaacacccgctcagcaggaaacagctccagaaataatggcctaacccctcaacctccaatatgattattgccctaaaatctcttagggggaaattgaggcagaatagatagtacagaaaatgaccatgatctcaggatacagaaaccatggtgactgtacagccgacacaataagccgtagcattcgcattgtaattgggcttattcaagcaaagttatcctcattaaggactttctgttctagaaagcatgtacattttgatttcacctgtcctcaaacttaactttcgcttattttaatagcaaaaaatataggccctagccaggcaaggtggctcatacctgtactcccagcactttgggaggctgaggaagatggatcacttcaaaccagaagcttgagactagactggccaacatagtgaaatcccgtctcaactaaaaatacaaaaattagcagggtatggtggtgcatgcctgtaatcccagatactctggaggcagaggcatgagcatggcttgaactcaggaggtggaggttgcagtgagcagagatcacaccactgcactccagcctgggcaacatggggagactctgtctcaaacaaacaaacaaacaaacagaaatacactcctgggtggagatctaagatgctaacgagacatgcaacatatgaacaagcatgtatagtcactgcgtatgtgcacccagaatatcactcagaacatgcttataagcaactcctcttccccttttcttattaataataatgtaaaactcccgtaagggggtttctccagcgacaatccacgctgtctcactcttacgagcagtccgccctggagtatctctctcagggtgtactgtattctgcacttaactttcaaatattttcttttccaataaattatgctgtactttttttccttgtgtctcttgtttaaattcttaaaaactaagaagacaagaacagaggtatcacatcagttgtcaacacagcaataagtcagcctacttcttgtaagcatagcccatgcagaaaaggagagtcgcatcacctaggtgctggatccagagatatgtcacaacttatcccaggcaccaagttaaggtcattgaagatagtcgtgttaaatagtttctgggcccagggatatgtcacaatggctcctgtgagcagagatcnnnnnnnnnnnnnnnnnnnnnnnnnnnnnnnnnnnnnnnnnnnnnnnnnnnnnnnnnnnnnnnnnnnnnnnnnnnnnnnnnnnnnnnnnnnnnnnnnnnnnnnnnnnnnnnnnnnnnnnnnnnnnnnnnnnnnnnnnnnnnnnnnnnnnnnnnnnnnnnnnnnnnnnnnnnnnnnnnnnnnnnnnnnnnnnnnnnnnnnnnnnnnnnnnnnnnnnnnnnnnnnnnnnnnnnnnnnnnnnnnnnnnnnnnnnnnnnnnnnnnnnnnnnnnnnnnnnnnnnnnnnnnnnnnnnnnnnnnnnnnnnnnnnnnnnnnnnnnnnnnnnnnnnnnnnnnnnnnnnnnnnnnnnnnnnnnnnnnnnnnnnnnnnnnnnnnnnnnnnnnnnnnnnnnnnnnnnnnnnnnnnnnnnnnnnnnnnnnnnnnnnnnnnnnnnnnnnnnnnnnnnnnnnnnnnnnnnnnnnnnnnnnnnnnnnnnnnnnnnnnnnnnnnnnnnnnnnnnnnnnnnnnnnnnnnnnnnnnnnnnnnnnnnnnnnnnnnnnnnnnnnnnnnnnnnnnnnnnnnnnnnnnnnnnnnnnnnnnnnnnnnnnnnnnnnnnnnnnnnnnnnnnnnnnnnnnnnnnnnnnnnnnnnnnnnnnnnnnnnnnnnnnnnnnnnnnnnnnnnnnnnnnnnnnnnnnnnnnnnnnnnnnnnnnnnnnnnnnnnnnnnnnnnnnnnnnnnnnnnnnnnnnnnnnnnnnnnnnnnnnnnnnnnnnnnnnnnnnnnnnnnnnnnnnnnnnnnnnnnnnnnnnnnnnnnnnnnnnnnnnnnnnnnnnnnnnnnnnnnnnnnnnnnnnnnnnnnnnnnnnnnnnnnnnnnnnnnnnnnnnnnnnnnnnnnnnnnnnnnnnnnnnnnnnnnnnnnnnnnnnnnnnnnnnnnnnnnnnnnnnnnnnnnnnnnnnnnnnnnnnnnnnnnnnnnnnnnnnnnnnnnnnnnnnnnnnnnnnnnnnnnnnnnnnnnnnnnnnnnnnnnnnnnnnnnnnnnnnnnnnnnnnnnnnnnnnnnnnnnnnnnnnnnnnnnnnnnnnnnnnnnnnnnnnnnnnnnnnnnnnnnnnnnnnnnnnnnnnnnnnnnnnnnnnnnnnnnnnnnnnnnnnnnnnnnnnnnnnnnnnnnnnnnnnnnnnnnnnnnnnnnnnnnnnnnnnnnnnnnnnnnnnnnnnnnnnnnnnnnnnnnnnnnnnnnnnnnnnnnnnnnnnnnnnnnnnnnnnnnnnnnnnnnnnnnnnnnnnnnnnnnnnnnnnnnnnnnnnnnnnnnnnnnnnnnnnnnnnnnnnnnnnnnnnnnnnnnnnnnnnnnnnnnnnnnnnnnnnnnnnnnnnnnnnnnnnnnnnnnnnnnnnnnnnnnnnnnnnnnnnnnnnnnnnnnnnnnnnnnnnnnnnnnnnnnnnnnnnnnnnnnnnnnnnnnnnnnnnnnnnnnnnnnnnnnnnnnnnnnnnnnnnnnnnnnnnnnnnnnnnnnnnnnnnnnnnnnnnnnnnnnnnnnnnnnnnnnnnnnnnnnnnnnnnnnnnnnnnnnnnnnnnnnnnnnnnnnnnnnnnnnnnnnnnnnnnnnnnnnnnnnnnnnnnnnnnnnnnnnnnnnnnnnnnnnnnnnnnnnnnnnnnnnnnnnnnnnnnnnnnnnnnnnnnnnnnnnnnnnnnnnnnnnnnnnnnnnnnnnnnnnnnnnnnnnnnnnnnnnnnnnnnnnnnnnnnnnnnnnnnnnnnnnnnnnnnnnnnnnnnnnnnnnnnnnnnnnnnnnnnnnnnnnnnnnnnnnnnnnnnnnnnnnnnnnnnnnnnnnnnnnnnnnnnnnnnnnnnnnnnnnnnnnnnnnnnnnnnnnnnnnnnnnnnnnnnnnnnnnnnnnnnnnnnnnnnnnnnnnnnnnnnnnnnnnnnnnnnnnnnnnnnnnnnnnnnnnnnnnnnnnnnnnnnnnnnnnnnnnnnnnnnnnnnnnnnnnnnnnnnnnnnnnnnnnnnnnnnnnnnnnnnnnnnnnnnnnnnnnnnnnnnnnnnnnnnnnnnnnnnnnnnnnnnnnnnnnnnnnnnnnnnnnnnnnnnnnnnnnnnnnnnnnnnnnnnnnnnnnnnnnnnnnnnnnnnnnnnnnnnnnnnnnnnnnnnnnnnnnnnnnnnnnnnnnnnnnnnnnnnnnnnnnnnnnnnnnnnnnnnnnnnnnnnnnnnnnnnnnnnnnnnnnnnnnnnnnnnnnnnnnnnnnnnnnnnnnnnnnnnnnnnnnnnnnnnnnnnnnnnnnnnnnnnnnnnnnnnnnnnnnnnnnnnnnnnnnnnnnnnnnnnnnnnnnnnnnnnnnnnnnnnnnnnnnnnnnnnnnnnnnnnnnnnnnnnnnnnnnnnnnnnnnnnnnnnnnnnnnnnnnnnnnnnnnnnnnnnnnnnnnnnnnnnnnnnnnnnnnnnnnnnnnnnnnnnnnnnnnnnnnnnnnnnnnnnnnnnnnnnnnnnnnnnnnnnnnnnnnnnnnnnnnnnnnnnnnnnnnnnnnnnnnnnnnnnnnnnnnnnnnnnnnnnnnnnnnnnnnnnnnnnnnnnnnnnnnnnnnnnnnnnnnnnnnnnnnnnnnnnnnnnnnnnnnnnnnnnnnnnnnnnnnnnnnnnnnnnnnnnnnnnnnnnnnnnnnnnnnnnnnnnnnnnnnnnnnnnnnnnnnnnnnnnnnnnnnnnnnnnnnnnnnnnnnnnnnnnnnnnnnnnnnnnnnnnnnnnnnnnnnnnnnnnnnnnnnnnnnnnnnnnnnnnnnnnnnnnnnnnnnnnnnnnnnnnnnnnnnnnnnnnnnnnnnnnnnnnnnnnnnnnnnnnnnnnnnnnnnnnnnnnnnnnnnnnnnnnnnnnnnnnnnnnnnnnnnnnnnnnnnnnnnnnnnnnnnnnnnnnnnnnnnnnnnnnnnnnnnnnnnnnnnnnnnnnnnnnnnnnnnnnnnnnnnnnnnnnnnnnnnnnnnnnnnnnnnnnnnnnnnnnnnnnnnnnnnnnnnnnnnnnnnnnnnnnnnnnnnnnnnnnnnnnnnnnnnnnnnnnnnnnnnnnnnnnnnnnnnnnnnnnnnnnnnnnnnnnnnnnnnnnnnnnnnnnnnnnnnnnnnnnnnnnnnnnnnnnnnnnnnnnnnnnnnnnnnnnnnnnnnnnnnnnnnnnnnnnnnnnnnnnnnnnnnnnnnnnnnnnnnnnnnnnnnnnnnnnnnnnnnnnnnnnnnnnnnnnnnnnnnnnnnnnnnnnnnnnnnnnnnnnnnnnnnnnnnnnnnnnnnnnnnnnnnnnnnnnnnnnnnnnnnnnnnnnnnnnnnnnnnnnnnnnnnnnnnnnnnnnnnnnnnnnnnnnnnnnnnnnnnnnnnnnnnnnnnnnnnnnnnnnnnnnnnnnnnnnnnnnnnnnnnnnnnnnnnnnnnnnnnnnnnnnnnnnnnnnnnnnnnnnnnnnnnnnnnnnnnnnnnnnnnnnnnnnnnnnnnnnnnnnnnnnnnnnnnnnnnnnnnnnnnnnnnnnnnnnnnnnnnnnnnnnnnnnnnnnnnnnnnnnnnnnnnnnnnnnnnnnnnnnnnnnnnnnnnnnnnnnnnnnnnnnnnnnnnnnnnnnnnnnnnnnnnnnnnnnnnnnnnnnnnnnnnnnnnnnnnnnnnnnnnnnnnnnnnnnnnnnnnnnnnnnnnnnnnnnnnnnnnnnnnnnnnnnnnnnnnnnnnnnnnnnnnnnnnnnnnnnnnnnnnnnnnnnnnnnnnnnnnnnnnnnnnnnnnnnnnnnnnnnnnnnnnnnnnnnnnnnnnnnnnnnnnnnnnnnnnnnnnnnnnnnnnnnnnnnnnnnnnnnnnnnnnnnnnnnnnnnnnnnnnnnnnnnnnnnnnnnnnnnnnnnnnnnnnnnnnnnnnnnnnnnnnnnnnnnnnnnnnnnnnnnnnnnnnnnnnnnnnnnnnnnnnnnnnnnnnnnnnnnnnnnnnnnnnnnnnnnnnnnnnnnnnnnnnnnnnnnnnnnnnnnnnnnnnnnnnnnnnnnnnnnnnnnnnnnnnnnnnnnnnnnnnnnnnnnnnnnnnnnnnnnnnnnnnnnnnnnnnnnnnnnnnnnnnnnnnnnnnnnnnnnnnnnnnnnnnnnnnnnnnnnnnnnnnnnnnnnnnnnnnnnnnnnnnnnnnnnnnnnnnnnnnnnnnnnnnnnnnnnnnnnnnnnnnnnnnnnnnnnnnnnnnnnnnnnnnnnnnnnnnnnnnnnnnnnnnnnnnnnnnnnnnnnnnnnnnnnnnnnnnnnnnnnnnnnnnnnnnnnnnnnnnnnnnnnnnnnnnnnnnnnnnnnnnnnnnnnnnnnnnnnnnnnnnnnnnnnnnnnnnnnnnnnnnnnnnnnnnnnnnnnnnnnnnnnnnnnnnnnnnnnnnnnnnnnnnnnnnnnnnnnnnnnnnnnnnnnnnnnnnnnnnnnnnnnnnnnnnnnnnnnnnnnnnnnnnnnnnnnnnnnnnnnnnnnnnnnnnnnnnnnnnnnnnnnnnnnnnnnnnnnnnnnnnnnnnnnnnnnnnnnnnnnnnnnnnnnnnnnnnnnnnnnnnnnnnnnnnnnnnnnnnnnnnnnnnnnnnnnnnnnnnnnnnnnnnnnnnnnnnnnnnnnnnnnnnnnnnnnnnnnnnnnnnnnnnnnnnnnnnnnnnnnnnnnnnnnnnnnnnnnnnnnnnnnnnnnnnnnnnnnnnnnnnnnnnnnnnnnnnnnnnnnnnnnnnnnnnnnnnnnnnnnnnnnnnnnnnnnnnnnnnnnnnnnnnnnnnnnnnnnnnnnnnnnnnnnnnnnnnnnnnnnnnnnnnnnnnnnnnnnnnnnnnnnnnnnnnnnnnnnnnnnnnnnnnnnnnnnnnnnnnnnnnnnnnnnnnnnnnnnnnnnnnnnnnnnnnnnnnnnnnnnnnnnnnnnnnnnnnnnnnnnnnnnnnnnnnnnnnnnnnnnnnnnnnnnnnnnnnnnnnnnnnnnnnnnnnnnnnnnnnnnnnnnnnnnnnnnnnnnnnnnnnnnnnnnnnnnnnnnnnnnnnnnnnnnnnnnnnnnnnnnnnnnnnnnnnnnnnnnnnnnnnnnnnnnnnnnnnnnnnnnnnnnnnnnnnnnnnnnnnnnnnnnnnnnnnnnnnnnnnnnnnnnnnnnnnnnnnnnnnnnnnnnnnnnnnnnnnnnnnnnnnnnnnnnnnnnnnnnnnnnnnnnnnnnnnnnnnnnnnnnnnnnnnnnnnnnnnnnnnnnnnnnnnnnnnnnnnnnnnnnnnnnnnnnnnnnnnnnnnnnnnnnnnnnnnnnnnnnnnnnnnnnnnnnnnnnnnnnnnnnnnnnnnnnnnnnnnnnnnnnnnnnnnnnnnnnnnnnnnnnnnnnnnnnnnnnnnnnnnnnnnnnnnnnnnnnnnnnnnnnnnnnnnnnnnnnnnnnnnnnnnnnnnnnnnnnnnnnnnnnnnnnnnnnnnnnnnnnnnnnnnnnnnnnnnnnnnnnnnnnnnnnnnnnnnnnnnnnnnnnnnnnnnnnnnnnnnnnnnnnnnnnnnnnnnnnnnnnnnnnnnnnnnnnnnnnnnnnnnnnnnnnnnnnnnnnnnnnnnnnnnnnnnnnnnnnnnnnnnnnnnnnnnnnnnnnnnnnnnnnnnnnnnnnnnnnnnnnnnnnnnnnnnnnnnnnnnnnnnnnnnnnnnnnnnnnnnnnnnnnnnnnnnnnnnnnnnnnnnnnnnnnnnnnnnnnnnnnnnnnnnnnnnnnnnnnnnnnnnnnnnnnnnnnnnnnnnnnnnnnnnnnnnnnnnnnnnnnnnnnnnnnnnnnnnnnnnnnnnnnnnnnnnnnnnnnnnnnnnnnnnnnnnnnnnnnnnnnnnnnnnnnnnnnnnnnnnnnnnnnnnnnnnnnnnnnnnnnnnnnnnnnnnnnnnnnnnnnnnnnnnnnnnnnnnnnnnnnnnnnnnnnnnnnnnnnnnnnnnnnnnnnnnnnnnnnnnnnnnnnnnnnnnnnnnnnnnnnnnnnnnnnnnnnnnnnnnnnnnnnnnnnnnnnnnnnnnnnnnnnnnnnnnnnnnnnnnnnnnnnnnnnnnnnnnnnnnnnnnnnnnnnnnnnnnnnnnnnnnnnnnnnnnnnnnnnnnnnnnnnnnnnnnnnnnnnnnnnnnnnnnnnnnnnnnnnnnnnnnnnnnnnnnnnnnnnnnnnnnnnnnnnnnnnnnnnnnnnnnnnnnnnnnnnnnnnnnnnnnnnnnnnnnnnnnnnnnnnnnnnnnnnnnnnnnnnnnnnnnnnnnnnnnnnnnnnnnnnnnnnnnnnnnnnnnnnnnnnnnnnnnnnnnnnnnnnnnnnnnnnnnnnnnnnnnnnnnnnnnnnnnnnnnnnnnnnnnnnnnnnnnnnnnnnnnnnnnnnnnnnnnnnnnnnnnnnnnnnnnnnnnnnnnnnnnnnnnnnnnnnnnnnnnnnnnnnnnnnnnnnnnnnnnnnnnnnnnnnnnnnnnnnnnnnnnnnnnnnnnnnnnnnnnnnnnnnnnnnnnnnnnnnnnnnnnnnnnnnnnnnnnnnnnnnnnnnnnnnnnnnnnnnnnnnnnnnnnnnnnnnnnnnnnnnnnnnnnnnnnnnnnnnnnnnnnnnnnnnnnnnnnnnnnnnnnnnnnnnnnnnnnnnnnnnnnnnnnnnnnnnnnnnnnnnnnnnnnnnnnnnnnnnnnnnnnnnnnnnnnnnnnnnnnnnnnnnnnnnnnnnnnnnnnnnnnnnnnnnnnnnnnnnnnnnnnnnnnnnnnnnnnnnnnnnnnnnnnnnnnnnnnnnnnnnnnnnnnnnnnnnnnnnnnnnnnnnnnnnnnnnnnnnnnnnnnnnnnnnnnnnnnnnnnnnnnnnnnnnnnnnnnnnnnnnnnnnnnnnnnnnnnnnnnnnnnnnnnnnnnnnnnnnnnnnnnnnnnnnnnnnnnnnnnnnnnnnnnnnnnnnnnnnnnnnnnnnnnnnnnnnnnnnnnnnnnnnnnnnnnnnnnnnnnnnnnnnnnnnnnnnnnnnnnnnnnnnnnnnnnnnnnnnnnnnnnnnnnnnnnnnnnnnnnnnnnnnnnnnnnnnnnnnnnnnnnnnnnnnnnnnnnnnnnnnnnnnnnnnnnnnnnnnnnnnnnnnnnnnnnnnnnnnnnnnnnnnnnnnnnnnnnnnnnnnnnnnnnnnnnnnnnnnnnnnnnnnnnnnnnnnnnnnnnnnnnnnnnnnnnnnnnnnnnnnnnnnnnnnnnnnnnnnnnnnnnnnnnnnnnnnnnnnnnnnnnnnnnnnnnnnnnnnnnnnnnnnnnnnnnnnnnnnnnnnnnnnnnnnnnnnnnnnnnnnnnnnnnnnnnnnnnnnnnnnnnnnnnnnnnnnnnnnnnnnnnnnnnnnnnnnnnnnnnnnnnnnnnnnnnnnnnnnnnnnnnnnnnnnnnnnnnnnnnnnnnnnnnnnnnnnnnnnnnnnnnnnnnnnnnnnnnnnnnnnnnnnnnnnnnnnnnnnnnnnnnnnnnnnnnnnnnnnnnnnnnnnnnnnnnnnnnnnnnnnnnnnnnnnnnnnnnnnnnnnnnnnnnnnnnnnnnnnnnnnnnnnnnnnnnnnnnnnnnnnnnnnnnnnnnnnnnnnnnnnnnnnnnnnnnnnnnnnnnnnnnnnnnnnnnnnnnnnnnnnnnnnnnnnnnnnnnnnnnnnnnnnnnnnnnnnnnnnnnnnnnnnnnnnnnnnnnnnnnnnnnnnnnnnnnnnnnnnnnnnnnnnnnnnnnnnnnnnnnnnnnnnnnnnnnnnnnnnnnnnnnnnnnnnnnnnnnnnnnnnnnnnnnnnnnnnnnnnnnnnnnnnnnnnnnnnnnnnnnnnnnnnnnnnnnnnnnnnnnnnnnnnnnnnnnnnnnnnnnnnnnnnnnnnnnnnnnnnnnnnnnnnnnnnnnnnnnnnnnnnnnnnnnnnnnnnnnnnnnnnnnnnnnnnnnnnnnnnnnnnnnnnnnnnnnnnnnnnnnnnnnnnnnnnnnnnnnnnnnnnnnnnnnnnnnnnnnnnnnnnnnnnnnnnnnnnnnnnnnnnnnnnnnnnnnnnnnnnnnnnnnnnnnnnnnnnnnnnnnnnnnnnnnnnnnnnnnnnnnnnnnnnnnnnnnnnnnnnnnnnnnnnnnnnnnnnnnnnnnnnnnnnnnnnnnnnnnnnnnnnnnnnnnnnnnnnnnnnnnnnnnnnnnnnnnnnnnnnnnnnnnnnnnnnnnnnnnnnnnnnnnnnnnnnnnnnnnnnnnnnnnnnnnnnnnnnnnnnnnnnnnnnnnnnnnnnnnnnnnnnnnnnnnnnnnnnnnnnnnnnnnnnnnnnnnnnnnnnnnnnnnnnnnnnnnnnnnnnnnnnnnnnnnnnnnnnnnnnnnnnnnnnnnnnnnnnnnnnnnnnnnnnnnnnnnnnnnnnnnnnnnnnnnnnnnnnnnnnnnnnnnnnnnnnnnnnnnnnnnnnnnnnnnnnnnnnnnnnnnnnnnnnnnnnnnnnnnnnnnnnnnnnnnnnnnnnnnnnnnnnnnnnnnnnnnnnnnnnnnnnnnnnnnnnnnnnnnnnnnnnnnnnnnnnnnnnnnnnnnnnnnnnnnnnnnnnnnnnnnnnnnnnnnnnnnnnnnnnnnnnnnnnnnnnnnnnnnnnnnnnnnnnnnnnnnnnnnnnnnnnnnnnnnnnnnnnnnnnnnnnnnnnnnnnnnnnnnnnnnnnnnnnnnnnnnnnnnnnnnnnnnnnnnnnnnnnnnnnnnnnnnnnnnnnnnnnnnnnnnnnnnnnnnnnnnnnnnnnnnnnnnnnnnnnnnnnnnnnnnnnnnnnnnnnnnnnnnnnnnnnnnnnnnnnnnnnnnnnnnnnnnnnnnnnnnnnnnnnnnnnnnnnnnnnnnnnnnnnnnnnnnnnnnnnnnnnnnnnnnnnnnnnnnnnnnnnnnnnnnnnnnnnnnnnnnnnnnnnnnnnnnnnnnnnnnnnnnnnnnnnnnnnnnnnnnnnnnnnnnnnnnnnnnnnnnnnnnnnnnnnnnnnnnnnnnnnnnnnnnnnnnnnnnnnnnnnnnnnnnnnnnnnnnnnnnnnnnnnnnnnnnnnnnnnnnnnnnnnnnnnnnnnnnnnnnnnnnnnnnnnnnnnnnnnnnnnnnnnnnnnnnnnnnnnnnnnnnnnnnnnnnnnnnnnnnnnnnnnnnnnnnnnnnnnnnnnnnnnnnnnnnnnnnnnnnnnnnnnnnnnnnnnnnnnnnnnnnnnnnnnnnnnnnnnnnnnnnnnnnnnnnnnnnnnnnnnnnnnnnnnnnnnnnnnnnnnnnnnnnnnnnnnnnnnnnnnnnnnnnnnnnnnnnnnnnnnnnnnnnnnnnnnnnnnnnnnnnnnnnnnnnnnnnnnnnnnnnnnnnnnnnnnnnnnnnnnnnnnnnnnnnnnnnnnnnnnnnnnnnnnnnnnnnnnnnnnnnnnnnnnnnnnnnnnnnnnnnnnnnnnnnnnnnnnnnnnnnnnnnnnnnnnnnnnnnnnnnnnnnnnnnnnnnnnnnnnnnnnnnnnnnnnnnnnnnnnnnnnnnnnnnnnnnnnnnnnnnnnnnnnnnnnnnnnnnnnnnnnnnnnnnnnnnnnnnnnnnnnnnnnnnnnnnnnnnnnnnnnnnnnnnnnnnnnnnnnnnnnnnnnnnnnnnnnnnnnnnnnnnnnnnnnnnnnnnnnnnnnnnnnnnnnnnnnnnnnnnnnnnnnnnnnnnnnnnnnnnnnnnnnnnnnnnnnnnnnnnnnnnnnnnnnnnnnnnnnnnnnnnnnnnnnnnnnnnnnnnnnnnnnnnnnnnnnnnnnnnnnnnnnnnnnnnnnnnnnnnnnnnnnnnnnnnnnnnnnnnnnnnnnnnnnnnnnnnnnnnnnnnnnnnnnnnnnnnnnnnnnnnnnnnnnnnnnnnnnnnnnnnnnnnnnnnnnnnnnnnnnnnnnnnnnnnnnnnnnnnnnnnnnnnnnnnnnnnnnnnnnnnnnnnnnnnnnnnnnnnnnnnnnnnnnnnnnnnnnnnnnnnnnnnnnnnnnnnnnnnnnnnnnnnnnnnnnnnnnnnnnnnnnnnnnnnnnnnnnnnnnnnnnnnnnnnnnnnnnnnnnnnnnnnnnnnnnnnnnnnnnnnnnnnnnnnnnnnnnnnnnnnnnnnnnnnnnnnnnnnnnnnnnnnnnnnnnnnnnnnnnnnnnnnnnnnnnnnnnnnnnnnnnnnnnnnnnnnnnnnnnnnnnnnnnnnnnnnnnnnnnnnnnnnnnnnnnnnnnnnnnnnnnnnnnnnnnnnnnnnnnnnnnnnnnnnnnnnnnnnnnnnnnnnnnnnnnnnnnnnnnnnnnnnnnnnnnnnnnnnnnnnnnnnnnnnnnnnnnnnnnnnnnnnnnnnnnnnnnnnnnnnnnnnnnnnnnnnnnnnnnnnnnnnnnnnnnnnnnnnnnnnnnnnnnnnnnnnnnnnnnnnnnnnnnnnnnnnnnnnnnnnnnnnnnnnnnnnnnnnnnnnnnnnnnnnnnnnnnnnnnnnnnnnnnnnnnnnnnnnnnnnnnnnnnnnnnnnnnnnnnnnnnnnnnnnnnnnnnnnnnnnnnnnnnnnnnnnnnnnnnnnnnnnnnnnnnnnnnnnnnnnnnnnnnnnnnnnnnnnnnnnnnnnnnnnnnnnnnnnnnnnnnnnnnnnnnnnnnnnnnnnnnnnnnnnnnnnnnnnnnnnnnnnnnnnnnnnnnnnnnnnnnnnnnnnnnnnnnnnnnnnnnnnnnnnnnnnnnnnnnnnnnnnnnnnnnnnnnnnnnnnnnnnnnnnnnnnnnnnnnnnnnnnnnnnnnnnnnnnnnnnnnnnnnnnnnnnnnnnnnnnnnnnnnnnnnnnnnnnnnnnnnnnnnnnnnnnnnnnnnnnnnnnnnnnnnnnnnnnnnnnnnnnnnnnnnnnnnnnnnnnnnnnnnnnnnnnnnnnnnnnnnnnnnnnnnnnnnnnnnnnnnnnnnnnnnnnnnnnnnnnnnnnnnnnnnnnnnnnnnnnnnnnnnnnnnnnnnnnnnnnnnnnnnnnnnnnnnnnnnnnnnnnnnnnnnnnnnnnnnnnnnnnnnnnnnnnnnnnnnnnnnnnnnnnnnnnnnnnnnnnnnnnnnnnnnnnnnnnnnnnnnnnnnnnnnnnnnnnnnnnnnnnnnnnnnnnnnnnnnnnnnnnnnnnnnnnnnnnnnnnnnnnnnnnnnnnnnnnnnnnnnnnnnnnnnnnnnnnnnnnnnnnnnnnnnnnnnnnnnnnnnnnnnnnnnnnnnnnnnnnnnnnnnnnnnnnnnnnnnnnnnnnnnnnnnnnnnnnnnnnnnnnnnnnnnnnnnnnnnnnnnnnnnnnnnnnnnnnnnnnnnnnnnnnnnnnnnnnnnnnnnnnnnnnnnnnnnnnnnnnnnnnnnnnnnnnnnnnnnnnnnnnnnnnnnnnnnnnnnnnnnnnnnnnnnnnnnnnnnnnnnnnnnnnnnnnnnnnnnnnnnnnnnnnnnnnnnnnnnnnnnnnnnnnnnnnnnnnnnnnnnnnnnnnnnnnnnnnnnnnnnnnnnnnnnnnnnnnnnnnnnnnnnnnnnnnnnnnnnnnnnnnnnnnnnnnnnnnnnnnnnnnnnnnnnnnnnnnnnnnnnnnnnnnnnnnnnnnnnnnnnnnnnnnnnnnnnnnnnnnnnnnnnnnnnnnnnnnnnnnnnnnnnnnnnnnnnnnnnnnnnnnnnnnnnnnnnnnnnnnnnnnnnnnnnnnnnnnnnnnnnnnnnnnnnnnnnnnnnnnnnnnnnnnnnnnnnnnnnnnnnnnnnnnnnnnnnnnnnnnnnnnnnnnnnnnnnnnnnnnnnnnnnnnnnnnnnnnnnnnnnnnnnnnnnnnnnnnnnnnnnnnnnnnnnnnnnnnnnnnnnnnnnnnnnnnnnnnnnnnnnnnnnnnnnnnnnnnnnnnnnnnnnnnnnnnnnnnnnnnnnnnnnnnnnnnnnnnnnnnnnnnnnnnnnnnnnnnnnnnnnnnnnnnnnnnnnnnnnnnnnnnnnnnnnnnnnnnnnnnnnnnnnnnnnnnnnnnnnnnnnnnnnnnnnnnnnnnnnnnnnnnnnnnnnnnnnnnnnnnnnnnnnnnnnnnnnnnnnnnnnnnnnnnnnnnnnnnnnnnnnnnnnnnnnnnnnnnnnnnnnnnnnnnnnnnnnnnnnnnnnnnnnnnnnnnnnnnnnnnnnnnnnnnnnnnnnnnnnnnnnnnnnnnnnnnnnnnnnnnnnnnnnnnnnnnnnnnnnnnnnnnnnnnnnnnnnnnnnnnnnnnnnnnnnnnnnnnnnnnnnnnnnnnnnnnnnnnnnnnnnnnnnnnnnnnnnnnnnnnnnnnnnnnnnnnnnnnnnnnnnnnnnnnnnnnnnnnnnnnnnnnnnnnnnnnnnnnnnnnnnnnnnnnnnnnnnnnnnnnnnnnnnnnnnnnnnnnnnnnnnnnnnnnnnnnnnnnnnnnnnnnnnnnnnnnnnnnnnnnnnnnnnnnnnnnnnnnnnnnnnnnnnnnnnnnnnnnnnnnnnnnnnnnnnnnnnnnnnnnnnnnnnnnnnnnnnnnnnnnnnnnnnnnnnnnnnnnnnnnnnnnnnnnnnnnnnnnnnnnnnnnnnnnnnnnnnnnnnnnnnnnnnnnnnnnnnnnnnnnnnnnnnnnnnnnnnnnnnnnnnnnnnnnnnnnnnnnnnnnnnnnnnnnnnnnnnnnnnnnnnnnnnnnnnnnnnnnnnnnnnnnnnnnnnnnnnnnnnnnnnnnnnnnnnnnnnnnnnnnnnnnnnnnnnnnnnnnnnnnnnnnnnnnnnnnnnnnnnnnnnnnnnnnnnnnnnnnnnnnnnnnnnnnnnnnnnnnnnnnnnnnnnnnnnnnnnnnnnnnnnnnnnnnnnnnnnnnnnnnnnnnnnnnnnnnnnnnnnnnnnnnnnnnnnnnnnnnnnnnnnnnnnnnnnnnnnnnnnnnnnnnnnnnnnnnnnnnnnnnnnnnnnnnnnnnnnnnnnnnnnnnnnnnnnnnnnnnnnnnnnnnnnnnnnnnnnnnnnnnnnnnnnnnnnnnnnnnnnnnnnnnnnnnnnnnnnnnnnnnnnnnnnnnnnnnnnnnnnnnnnnnnnnnnnnnnnnnnnnnnnnnnnnnnnnnnnnnnnnnnnnnnnnnnnnnnnnnnnnnnnnnnnnnnnnnnnnnnnnnnnnnnnnnnnnnnnnnnnnnnnnnnnnnnnnnnnnnnnnnnnnnnnnnnnnnnnnnnnnnnnnnnnnnnnnnnnnnnnnnnnnnnnnnnnnnnnnnnnnnnnnnnnnnnnnnnnnnnnnnnnnnnnnnnnnnnnnnnnnnnnnnnnnnnnnnnnnnnnnnnnnnnnnnnnnnnnnnnnnnnnnnnnnnnnnnnnnnnnnnnnnnnnnnnnnnnnnnnnnnnnnnnnnnnnnnnnnnnnnnnnnnnnnnnnnnnnnnnnnnnnnnnnnnnnnnnnnnnnnnnnnnnnnnnnnnnnnnnnnnnnnnnnnnnnnnnnnnnnnnnnnnnnnnnnnnnnnnnnnnnnnnnnnnnnnnnnnnnnnnnnnnnnnnnnnnnnnnnnnnnnnnnnnnnnnnnnnnnnnnnnnnnnnnnnnnnnnnnnnnnnnnnnnnnnnnnnnnnnnnnnnnnnnnnnnnnnnnnnnnnnnnnnnnnnnnnnnnnnnnnnnnnnnnnnnnnnnnnnnnnnnnnnnnnnnnnnnnnnnnnnnnnnnnnnnnnnnnnnnnnnnnnnnnnnnnnnnnnnnnnnnnnnnnnnnnnnnnnnnnnnnnnnnnnnnnnnnnnnnnnnnnnnnnnnnnnnnnnnnnnnnnnnnnnnnnnnnnnnnnnnnnnnnnnnnnnnnnnnnnnnnnnnnnnnnnnnnnnnnnnnnnnnnnnnnnnnnnnnnnnnnnnnnnnnnnnnnnnnnnnnnnnnnnnnnnnnnnnnnnnnnnnnnnnnnnnnnnnnnnnnnnnnnnnnnnnnnnnnnnnnnnnnnnnnnnnnnnnnnnnnnnnnnnnnnnnnnnnnnnnnnnnnnnnnnnnnnnnnnnnnnnnnnnnnnnnnnnnnnnnnnnnnnnnnnnnnnnnnnnnnnnnnnnnnnnnnnnnnnnnnnnnnnnnnnnnnnnnnnnnnnnnnnnnnnnnnnnnnnnnnnnnnnnnnnnnnnnnnnnnnnnnnnnnnnnnnnnnnnnnnnnnnnnnnnnnnnnnnnnnnnnnnnnnnnnnnnnnnnnnnnnnnnnnnnnnnnnnnnnnnnnnnnnnnnnnnnnnnnnnnnnnnnnnnnnnnnnnnnnnnnnnnnnnnnnnnnnnnnnnnnnnnnnnnnnnnnnnnnnnnnnnnnnnnnnnnnnnnnnnnnnnnnnnnnnnnnnnnnnnnnnnnnnnnnnnnnnnnnnnnnnnnnnnnnnnnnnnnnnnnnnnnnnnnnnnnnnnnnnnnnnnnnnnnnnnnnnnnnnnnnnnnnnnnnnnnnnnnnnnnnnnnnnnnnnnnnnnnnnnnnnnnnnnnnnnnnnnnnnnnnnnnnnnnnnnnnnnnnnnnnnnnnnnnnnnnnnnnnnnnnnnnnnnnnnnnnnnnnnnnnnnnnnnnnnnnnnnnnnnnnnnnnnnnnnnnnnnnnnnnnnnnnnnnnnnnnnnnnnnnnnnnnnnnnnnnnnnnnnnnnnnnnnnnnnnnnnnnnnnnnnnnnnnnnnnnnnnnnnnnnnnnnnnnnnnnnnnnnnnnnnnnnnnnnnnnnnnnnnnnnnnnnnnnnnnnnnnnnnnnnnnnnnnnnnnnnnnnnnnnnnnnnnnnnnnnnnnnnnnnnnnnnnnnnnnnnnnnnnnnnnnnnnnnnnnnnnnnnnnnnnnnnnnnnnnnnnnnnnnnnnnnnnnnnnnnnnnnnnnnnnnnnnnnnnnnnnnnnnnnnnnnnnnnnnnnnnnnnnnnnnnnnnnnnnnnnnnnnnnnnnnnnnnnnnnnnnnnnnnnnnnnnnnnnnnnnnnnnnnnnnnnnnnnnnnnnnnnnnnnnnnnnnnnnnnnnnnnnnnnnnnnnnnnnnnnnnnnnnnnnnnnnnnnnnnnnnnnnnnnnnnnnnnnnnnnnnnnnnnnnnnnnnnnnnnnnnnnnnnnnnnnnnnnnnnnnnnnnnnnnnnnnnnnnnnnnnnnnnnnnnnnnnnnnnnnnnnnnnnnnnnnnnnnnnnnnnnnnnnnnnnnnnnnnnnnnnnnnnnnnnnnnnnnnnnnnnnnnnnnnnnnnnnnnnnnnnnnnnnnnnnnnnnnnnnnnnnnnnnnnnnnnnnnnnnnnnnnnnnnnnnnnnnnnnnnnnnnnnnnnnnnnnnnnnnnnnnnnnnnnnnnnnnnnnnnnnnnnnnnnnnnnnnnnnnnnnnnnnnnnnnnnnnnnnnnnnnnnnnnnnnnnnnnnnnnnnnnnnnnnnnnnnnnnnnnnnnnnnnnnnnnnnnnnnnnnnnnnnnnnnnnnnnnnnnnnnnnnnnnnnnnnnnnnnnnnnnnnnnnnnnnnnnnnnnnnnnnnnnnnnnnnnnnnnnnnnnnnnnnnnnnnnnnnnnnnnnnnnnnnnnnnnnnnnnnnnnnnnnnnnnnnnnnnnnnnnnnnnnnnnnnnnnnnnnnnnnnnnnnnnnnnnnnnnnnnnnnnnnnnnnnnnnnnnnnnnnnnnnnnnnnnnnnnnnnnnnnnnnnnnnnnnnnnnnnnnnnnnnnnnnnnnnnnnnnnnnnnnnnnnnnnnnnnnnnnnnnnnnnnnnnnnnnnnnnnnnnnnnnnnnnnnnnnnnnnnnnnnnnnnnnnnnnnnnnnnnnnnnnnnnnnnnnnnnnnnnnnnnnnnnnnnnnnnnnnnnnnnnnnnnnnnnnnnnnnnnnnnnnnnnnnnnnnnnnnnnnnnnnnnnnnnnnnnnnnnnnnnnnnnnnnnnnnnnnnnnnnnnnnnnnnnnnnnnnnnnnnnnnnnnnnnnnnnnnnnnnnnnnnnnnnnnnnnnnnnnnnnnnnnnnnnnnnnnnnnnnnnnnnnnnnnnnnnnnnnnnnnnnnnnnnnnnnnnnnnnnnnnnnnnnnnnnnnnnnnnnnnnnnnnnnnnnnnnnnnnnnnnnnnnnnnnnnnnnnnnnnnnnnnnnnnnnnnnnnnnnnnnnnnnnnnnnnnnnnnnnnnnnnnnnnnnnnnnnnnnnnnnnnnnnnnnnnnnnnnnnnnnnnnnnnnnnnnnnnnnnnnnnnnnnnnnnnnnnnnnnnnnnnnnnnnnnnnnnnnnnnnnnnnnnnnnnnnnnnnnnnnnnnnnnnnnnnnnnnnnnnnnnnnnnnnnnnnnnnnnnnnnnnnnnnnnnnnnnnnnnnnnnnnnnnnnnnnnnnnnnnnnnnnnnnnnnnnnnnnnnnnnnnnnnnnnnnnnnnnnnnnnnnnnnnnnnnnnnnnnnnnnnnnnnnnnnnnnnnnnnnnnnnnnnnnnnnnnnnnnnnnnnnnnnnnnnnnnnnnnnnnnnnnnnnnnnnnnnnnnnnnnnnnnnnnnnnnnnnnnnnnnnnnnnnnnnnnnnnnnnnnnnnnnnnnnnnnnnnnnnnnnnnnnnnnnnnnnnnnnnnnnnnnnnnnnnnnnnnnnnnnnnnnnnnnnnnnnnnnnnnnnnnnnnnnnnnnnnnnnnnnnnnnnnnnnnnnnnnnnnnnnnnnnnnnnnnnnnnnnnnnnnnnnnnnnnnnnnnnnnnnnnnnnnnnnnnnnnnnnnnnnnnnnnnnnnnnnnnnnnnnnnnnnnnnnnnnnnnnnnnnnnnnnnnnnnnnnnnnnnnnnnnnnnnnnnnnnnnnnnnnnnnnnnnnnnnnnnnnnnnnnnnnnnnnnnnnnnnnnnnnnnnnnnnnnnnnnnnnnnnnnnnnnnnnnnnnnnnnnnnnnnnnnnnnnnnnnnnnnnnnnnnnnnnnnnnnnnnnnnnnnnnnnnnnnnnnnnnnnnnnnnnnnnnnnnnnnnnnnnnnnnnnnnnnnnnnnnnnnnnnnnnnnnnnnnnnnnnnnnnnnnnnnnnnnnnnnnnnnnnnnnnnnnnnnnnnnnnnnnnnnnnnnnnnnnnnnnnnnnnnnnnnnnnnnnnnnnnnnnnnnnnnnnnnnnnnnnnnnnnnnnnnnnnnnnnnnnnnnnnnnnnnnnnnnnnnnnnnnnnnnnnnnnnnnnnnnnnnnnnnnnnnnnnnnnnnnnnnnnnnnnnnnnnnnnnnnnnnnnnnnnnnnnnnnnnnnnnnnnnnnnnnnnnnnnnnnnnnnnnnnnnnnnnnnnnnnnnnnnnnnnnnnnnnnnnnnnnnnnnnnnnnnnnnnnnnnnnnnnnnnnnnnnnnnnnnnnnnnnnnnnnnnnnnnnnnnnnnnnnnnnnnnnnnnnnnnnnnnnnnnnnnnnnnnnnnnnnnnnnnnnnnnnnnnnnnnnnnnnnnnnnnnnnnnnnnnnnnnnnnnnnnnnnnnnnnnnnnnnnnnnnnnnnnnnnnnnnnnnnnnnnnnnnnnnnnnnnnnnnnnnnnnnnnnnnnnnnnnnnnnnnnnnnnnnnnnnnnnnnnnnnnnnnnnnnnnnnnnnnnnnnnnnnnnnnnnnnnnnnnnnnnnnnnnnnnnnnnnnnnnnnnnnnnnnnnnnnnnnnnnnnnnnnnnnnnnnnnnnnnnnnnnnnnnnnnnnnnnnnnnnnnnnnnnnnnnnnnnnnnnnnnnnnnnnnnnnnnnnnnnnnnnnnnnnnnnnnnnnnnnnnnnnnnnnnnnnnnnnnnnnnnnnnnnnnnnnnnnnnnnnnnnnnnnnnnnnnnnnnnnnnnnnnnnnnnnnnnnnnnnnnnnnnnnnnnnnnnnnnnnnnnnnnnnnnnnnnnnnnnnnnnnnnnnnnnnnnnnnnnnnnnnnnnnnnnnnnnnnnnnnnnnnnnnnnnnnnnnnnnnnnnnnnnnnnnnnnnnnnnnnnnnnnnnnnnnnnnnnnnnnnnnnnnnnnnnnnnnnnnnnnnnnnnnnnnnnnnnnnnnnnnnnnnnnnnnnnnnnnnnnnnnnnnnnnnnnnnnnnnnnnnnnnnnnnnnnnnnnnnnnnnnnnnnnnnnnnnnnnnnnnnnnnnnnnnnnnnnnnnnnnnnnnnnnnnnnnnnnnnnnnnnnnnnnnnnnnnnnnnnnnnnnnnnnnnnnnnnnnnnnnnnnnnnnnnnnnnnnnnnnnnnnnnnnnnnnnnnnnnnnnnnnnnnnnnnnnnnnnnnnnnnnnnnnnnnnnnnnnnnnnnnnnnnnnnnnnnnnnnnnnnnnnnnnnnnnnnnnnnnnnnnnnnnnnnnnnnnnnnnnnnnnnnnnnnnnnnnnnnnnnnnnnnnnnnnnnnnnnnnnnnnnnnnnnnnnnnnnnnnnnnnnnnnnnnnnnnnnnnnnnnnnnnnnnnnnnnnnnnnnnnnnnnnnnnnnnnnnnnnnnnnnnnnnnnnnnnnnnnnnnnnnnnnnnnnnnnnnnnnnnnnnnnnnnnnnnnnnnnnnnnnnnnnnnnnnnnnnnnnnnnnnnnnnnnnnnnnnnnnnnnnnnnnnnnnnnnnnnnnnnnnnnnnnnnnnnnnnnnnnnnnnnnnnnnnnnnnnnnnnnnnnnnnnnnnnnnnnnnnnnnnnnnnnnnnnnnnnnnnnnnnnnnnnnnnnnnnnnnnnnnnnnnnnnnnnnnnnnnnnnnnnnnnnnnnnnnnnnnnnnnnnnnnnnnnnnnnnnnnnnnnnnnnnnnnnnnnnnnnnnnnnnnnnnnnnnnnnnnnnnnnnnnnnnnnnnnnnnnnnnnnnnnnnnnnnnnnnnnnnnnnnnnnnnnnnnnnnnnnnnnnnnnnnnnnnnnnnnnnnnnnnnnnnnnnnnnnnnnnnnnnnnnnnnnnnnnnnnnnnnnnnnnnnnnnnnnnnnnnnnnnnnnnnnnnnnnnnnnnnnnnnnnnnnnnnnnnnnnnnnnnnnnnnnnnnnnnnnnnnnnnnnnnnnnnnnnnnnnnnnnnnnnnnnnnnnnnnnnnnnnnnnnnnnnnnnnnnnnnnnnnnnnnnnnnnnnnnnnnnnnnnnnnnnnnnnnnnnnnnnnnnnnnnnnnnnnnnnnnnnnnnnnnnnnnnnnnnnnnnnnnnnnnnnnnnnnnnnnnnnnnnnnnnnnnnnnnnnnnnnnnnnnnnnnnnnnnnnnnnnnnnnnnnnnnnnnnnnnnnnnnnnnnnnnnnnnnnnnnnnnnnnnnnnnnnnnnnnnnnnnnnnnnnnnnnnnnnnnnnnnnnnnnnnnnnnnnnnnnnnnnnnnnnnnnnnnnnnnnnnnnnnnnnnnnnnnnnnnnnnnnnnnnnnnnnnnnnnnnnnnnnnnnnnnnnnnnnnnnnnnnnnnnnnnnnnnnnnnnnnnnnnnnnnnnnnnnnnnnnnnnnnnnnnnnnnnnnnnnnnnnnnnnnnnnnnnnnnnnnnnnnnnnnnnnnnnnnnnnnnnnnnnnnnnnnnnnnnnnnnnnnnnnnnnnnnnnnnnnnnnnnnnnnnnnnnnnnnnnnnnnnnnnnnnnnnnnnnnnnnnnnnnnnnnnnnnnnnnnnnnnnnnnnnnnnnnnnnnnnnnnnnnnnnnnnnnnnnnnnnnnnnnnnnnnnnnnnnnnnnnnnnnnnnnnnnnnnnnnnnnnnnnnnnnnnnnnnnnnnnnnnnnnnnnnnnnnnnnnnnnnnnnnnnnnnnnnnnnnnnnnnnnnnnnnnnnnnnnnnnnnnnnnnnnnnnnnnnnnnnnnnnnnnnnnnnnnnnnnnnnnnnnnnnnnnnnnnnnnnnnnnnnnnnnnnnnnnnnnnnnnnnnnnnnnnnnnnnnnnnnnnnnnnnnnnnnnnnnnnnnnnnnnnnnnnnnnnnnnnnnnnnnnnnnnnnnnnnnnnnnnnnnnnnnnnnnnnnnnnnnnnnnnnnnnnnnnnnnnnnnnnnnnnnnnnnnnnnnnnnnnnnnnnnnnnnnnnnnnnnnnnnnnnnnnnnnnnnnnnnnnnnnnnnnnnnnnnnnnnnnnnnnnnnnnnnnnnnnnnnnnnnnnnnnnnnnnnnnnnnnnnnnnnnnnnnnnnnnnnnnnnnnnnnnnnnnnnnnnnnnnnnnnnnnnnnnnnnnnnnnnnnnnnnnnnnnnnnnnnnnnnnnnnnnnnnnnnnnnnnnnnnnnnnnnnnnnnnnnnnnnnnnnnnnnnnnnnnnnnnnnnnnnnnnnnnnnnnnnnnnnnnnnnnnnnnnnnnnnnnnnnnnnnnnnnnnnnnnnnnnnnnnnnnnnnnnnnnnnnnnnnnnnnnnnnnnnnnnnnnnnnnnnnnnnnnnnnnnnnnnnnnnnnnnnnnnnnnnnnnnnnnnnnnnnnnnnnnnnnnnnnnnnnnnnnnnnnnnnnnnnnnnnnnnnnnnnnnnnnnnnnnnnnnnnnnnnnnnnnnnnnnnnnnnnnnnnnnnnnnnnnnnnnnnnnnnnnnnnnnnnnnnnnnnnnnnnnnnnnnnnnnnnnnnnnnnnnnnnnnnnnnnnnnnnnnnnnnnnnnnnnnnnnnnnnnnnnnnnnnnnnnnnnnnnnnnnnnnnnnnnnnnnnnnnnnnnnnnnnnnnnnnnnnnnnnnnnnnnnnnnnnnnnnnnnnnnnnnnnnnnnnnnnnnnnnnnnnnnnnnnnnnnnnnnnnnnnnnnnnnnnnnnnnnnnnnnnnnnnnnnnnnnnnnnnnnnnnnnnnnnnnnnnnnnnnnnnnnnnnnnnnnnnnnnnnnnnnnnnnnnnnnnnnnnnnnnnnnnnnnnnnnnnnnnnnnnnnnnnnnnnnnnnnnnnnnnnnnnnnnnnnnnnnnnnnnnnnnnnnnnnnnnnnnnnnnnnnnnnnnnnnnnnnnnnnnnnnnnnnnnnnnnnnnnnnnnnnnnnnnnnnnnnnnnnnnnnnnnnnnnnnnnnnnnnnnnnnnnnnnnnnnnnnnnnnnnnnnnnnnnnnnnnnnnnnnnnnnnnnnnnnnnnnnnnnnnnnnnnnnnnnnnnnnnnnnnnnnnnnnnnnnnnnnnnnnnnnnnnnnnnnnnnnnnnnnnnnnnnnnnnnnnnnnnnnnnnnnnnnnnnnnnnnnnnnnnnnnnnnnnnnnnnnnnnnnnnnnnnnnnnnnnnnnnnnnnnnnnnnnnnnnnnnnnnnnnnnnnnnnnnnnnnnnnnnnnnnnnnnnnnnnnnnnnnnnnnnnnnnnnnnnnnnnnnnnnnnnnnnnnnnnnnnnnnnnnnnnnnnnnnnnnnnnnnnnnnnnnnnnnnnnnnnnnnnnnnnnnnnnnnnnnnnnnnnnnnnnnnnnnnnnnnnnnnnnnnnnnnnnnnnnnnnnnnnnnnnnnnnnnnnnnnnnnnnnnnnnnnnnnnnnnnnnnnnnnnnnnnnnnnnnnnnnnnnnnnnnnnnnnnnnnnnnnnnnnnnnnnnnnnnnnnnnnnnnnnnnnnnnnnnnnnnnnnnnnnnnnnnnnnnnnnnnnnnnnnnnnnnnnnnnnnnnnnnnnnnnnnnnnnnnnnnnnnnnnnnnnnnnnnnnnnnnnnnnnnnnnnnnnnnnnnnnnnnnnnnnnnnnnnnnnnnnnnnnnnnnnnnnnnnnnnnnnnnnnnnnnnnnnnnnnnnnnnnnnnnnnnnnnnnnnnnnnnnnnnnnnnnnnnnnnnnnnnnnnnnnnnnnnnnnnnnnnnnnnnnnnnnnnnnnnnnnnnnnnnnnnnnnnnnnnnnnnnnnnnnnnnnnnnnnnnnnnnnnnnnnnnnnnnnnnnnnnnnnnnnnnnnnnnnnnnnnnnnnnnnnnnnnnnnnnnnnnnnnnnnnnnnnnnnnnnnnnnnnnnnnnnnnnnnnnnnnnnnnnnnnnnnnnnnnnnnnnnnnnnnnnnnnnnnnnnnnnnnnnnnnnnnnnnnnnnnnnnnnnnnnnnnnnnnnnnnnnnnnnnnnnnnnnnnnnnnnnnnnnnnnnnnnnnnnnnnnnnnnnnnnnnnnnnnnnnnnnnnnnnnnnnnnnnnnnnnnnnnnnnnnnnnnnnnnnnnnnnnnnnnnnnnnnnnnnnnnnnnnnnnnnnnnnnnnnnnnnnnnnnnnnnnnnnnnnnnnnnnnnnnnnnnnnnnnnnnnnnnnnnnnnnnnnnnnnnnnnnnnnnnnnnnnnnnnnnnnnnnnnnnnnnnnnnnnnnnnnnnnnnnnnnnnnnnnnnnnnnnnnnnnnnnnnnnnnnnnnnnnnnnnnnnnnnnnnnnnnnnnnnnnnnnnnnnnnnnnnnnnnnnnnnnnnnnnnnnnnnnnnnnnnnnnnnnnnnnnnnnnnnnnnnnnnnnnnnnnnnnnnnnnnnnnnnnnnnnnnnnnnnnnnnnnnnnnnnnnnnnnnnnnnnnnnnnnnnnnnnnnnnnnnnnnnnnnnnnnnnnnnnnnnnnnnnnnnnnnnnnnnnnnnnnnnnnnnnnnnnnnnnnnnnnnnnnnnnnnnnnnnnnnnnnnnnnnnnnnnnnnnnnnnnnnnnnnnnnnnnnnnnnnnnnnnnnnnnnnnnnnnnnnnnnnnnnnnnnnnnnnnnnnnnnnnnnnnnnnnnnnnnnnnnnnnnnnnnnnnnnnnnnnnnnnnnnnnnnnnnnnnnnnnnnnnnnnnnnnnnnnnnnnnnnnnnnnnnnnnnnnnnnnnnnnnnnnnnnnnnnnnnnnnnnnnnnnnnnnnnnnnnnnnnnnnnnnnnnnnnnnnnnnnnnnnnnnnnnnnnnnnnnnnnnnnnnnnnnnnnnnnnnnnnnnnnnnnnnnnnnnnnnnnnnnnnnnnnnnnnnnnnnnnnnnnnnnnnnnnnnnnnnnnnnnnnnnnnnnnnnnnnnnnnnnnnnnnnnnnnnnnnnnnnnnnnnnnnnnnnnnnnnnnnnnnnnnnnnnnnnnnnnnnnnnnnnnnnnnnnnnnnnnnnnnnnnnnnnnnnnnnnnnnnnnnnnnnnnnnnnnnnnnnnnnnnnnnnnnnnnnnnnnnnnnnnnnnnnnnnnnnnnnnnnnnnnnnnnnnnnnnnnnnnnnnnnnnnnnnnnnnnnnnnnnnnnnnnnnnnnnnnnnnnnnnnnnnnnnnnnnnnnnnnnnnnnnnnnnnnnnnnnnnnnnnnnnnnnnnnnnnnnnnnnnnnnnnnnnnnnnnnnnnnnnnnnnnnnnnnnnnnnnnnnnnnnnnnnnnnnnnnnnnnnnnnnnnnnnnnnnnnnnnnnnnnnnnnnnnnnnnnnnnnnnnnnnnnnnnnnnnnnnnnnnnnnnnnnnnnnnnnnnnnnnnnnnnnnnnnnnnnnnnnnnnnnnnnnnnnnnnnnnnnnnnnnnnnnnnnnnnnnnnnnnnnnnnnnnnnnnnnnnnnnnnnnnnnnnnnnnnnnnnnnnnnnnnnnnnnnnnnnnnnnnnnnnnnnnnnnnnnnnnnnnnnnnnnnnnnnnnnnnnnnnnnnnnnnnnnnnnnnnnnnnnnnnnnnnnnnnnnnnnnnnnnnnnnnnnnnnnnnnnnnnnnnnnnnnnnnnnnnnnnnnnnnnnnnnnnnnnnnnnnnnnnnnnnnnnnnnnnnnnnnnnnnnnnnnnnnnnnnnnnnnnnnnnnnnnnnnnnnnnnnnnnnnnnnnnnnnnnnnnnnnnnnnnnnnnnnnnnnnnnnnnnnnnnnnnnnnnnnnnnnnnnnnnnnnnnnnnnnnnnnnnnnnnnnnnnnnnnnnnnnnnnnnnnnnnnnnnnnnnnnnnnnnnnnnnnnnnnnnnnnnnnnnnnnnnnnnnnnnnnnnnnnnnnnnnnnnnnnnnnnnnnnnnnnnnnnnnnnnnnnnnnnnnnnnnnnnnnnnnnnnnnnnnnnnnnnnnnnnnnnnnnnnnnnnnnnnnnnnnnnnnnnnnnnnnnnnnnnnnnnnnnnnnnnnnnnnnnnnnnnnnnnnnnnnnnnnnnnnnnnnnnnnnnnnnnnnnnnnnnnnnnnnnnnnnnnnnnnnnnnnnnnnnnnnnnnnnnnnnnnnnnnnnnnnnnnnnnnnnnnnnnnnnnnnnnnnnnnnnnnnnnnnnnnnnnnnnnnnnnnnnnnnnnnnnnnnnnnnnnnnnnnnnnnnnnnnnnnnnnnnnnnnnnnnnnnnnnnnnnnnnnnnnnnnnnnnnnnnnnnnnnnnnnnnnnnnnnnnnnnnnnnnnnnnnnnnnnnnnnnnnnnnnnnnnnnnnnnnnnnnnnnnnnnnnnnnnnnnnnnnnnnnnnnnnnnnnnnnnnnnnnnnnnnnnnnnnnnnnnnnnnnnnnnnnnnnnnnnnnnnnnnnnnnnnnnnnnnnnnnnnnnnnnnnnnnnnnnnnnnnnnnnnnnnnnnnnnnnnnnnnnnnnnnnnnnnnnnnnnnnnnnnnnnnnnnnnnnnnnnnnnnnnnnnnnnnnnnnnnnnnnnnnnnnnnnnnnnnnnnnnnnnnnnnnnnnnnnnnnnnnnnnnnnnnnnnnnnnnnnnnnnnnnnnnnnnnnnnnnnnnnnnnnnnnnnnnnnnnnnnnnnnnnnnnnnnnnnnnnnnnnnnnnnnnnnnnnnnnnnnnnnnnnnnnnnnnnnnnnnnnnnnnnnnnnnnnnnnnnnnnnnnnnnnnnnnnnnnnnnnnnnnnnnnnnnnnnnnnnnnnnnnnnnnnnnnnnnnnnnnnnnnnnnnnnnnnnnnnnnnnnnnnnnnnnnnnnnnnnnnnnnnnnnnnnnnnnnnnnnnnnnnnnnnnnnnnnnnnnnnnnnnnnnnnnnnnnnnnnnnnnnnnnnnnnnnnnnnnnnnnnnnnnnnnnnnnnnnnnnnnnnnnnnnnnnnnnnnnnnnnnnnnnnnnnnnnnnnnnnnnnnnnnnnnnnnnnnnnnnnnnnnnnnnnnnnnnnnnnnnnnnnnnnnnnnnnnnnnnnnnnnnnnnnnnnnnnnnnnnnnnnnnnnnnnnnnnnnnnnnnnnnnnnnnnnnnnnnnnnnnnnnnnnnnnnnnnnnnnnnnnnnnnnnnnnnnnnnnnnnnnnnnnnnnnnnnnnnnnnnnnnnnnnnnnnnnnnnnnnnnnnnnnnnnnnnnnnnnnnnnnnnnnnnnnnnnnnnnnnnnnnnnnnnnnnnnnnnnnnnnnnnnnnnnnnnnnnnnnnnnnnnnnnnnnnnnnnnnnnnnnnnnnnnnnnnnnnnnnnnnnnnnnnnnnnnnnnnnnnnnnnnnnnnnnnnnnnnnnnnnnnnnnnnnnnnnnnnnnnnnnnnnnnnnnnnnnnnnnnnnnnnnnnnnnnnnnnnnnnnnnnnnnnnnnnnnnnnnnnnnnnnnnnnnnnnnnnnnnnnnnnnnnnnnnnnnnnnnnnnnnnnnnnnnnnnnnnnnnnnnnnnnnnnnnnnnnnnnnnnnnnnnnnnnnnnnnnnnnnnnnnnnnnnnnnnnnnnnnnnnnnnnnnnnnnnnnnnnnnnnnnnnnnnnnnnnnnnnnnnnnnnnnnnnnnnnnnnnnnnnnnnnnnnnnnnnnnnnnnnnnnnnnnnnnnnnnnnnnnnnnnnnnnnnnnnnnnnnnnnnnnnnnnnnnnnnnnnnnnnnnnnnnnnnnnnnnnnnnnnnnnnnnnnnnnnnnnnnnnnnnnnnnnnnnnnnnnnnnnnnnnnnnnnnnnnnnnnnnnnnnnnnnnnnnnnnnnnnnnnnnnnnnnnnnnnnnnnnnnnnnnnnnnnnnnnnnnnnnnnnnnnnnnnnnnnnnnnnnnnnnnnnnnnnnnnnnnnnnnnnnnnnnnnnnnnnnnnnnnnnnnnnnnnnnnnnnnnnnnnnnnnnnnnnnnnnnnnnnnnnnnnnnnnnnnnnnnnnnnnnnnnnnnnnnnnnnnnnnnnnnnnnnnnnnnnnnnnnnnnnnnnnnnnnnnnnnnnnnnnnnnnnnnnnnnnnnnnnnnnnnnnnnnnnnnnnnnnnnnnnnnnnnnnnnnnnnnnnnnnnnnnnnnnnnnnnnnnnnnnnnnnnnnnnnnnnnnnnnnnnnnnnnnnnnnnnnnnnnnnnnnnnnnnnnnnnnnnnnnnnnnnnnnnnnnnnnnnnnnnnnnnnnnnnnnnnnnnnnnnnnnnnnnnnnnnnnnnnnnnnnnnnnnnnnnnnnnnnnnnnnnnnnnnnnnnnnnnnnnnnnnnnnnnnnnnnnnnnnnnnnnnnnnnnnnnnnnnnnnnnnnnnnnnnnnnnnnnnnnnnnnnnnnnnnnnnnnnnnnnnnnnnnnnnnnnnnnnnnnnnnnnnnnnnnnnnnnnnnnnnnnnnnnnnnnnnnnnnnnnnnnnnnnnnnnnnnnnnnnnnnnnnnnnnnnnnnnnnnnnnnnnnnnnnnnnnnnnnnnnnnnnnnnnnnnnnnnnnnnnnnnnnnnnnnnnnnnnnnnnnnnnnnnnnnnnnnnnnnnnnnnnnnnnnnnnnnnnnnnnnnnnnnnnnnnnnnnnnnnnnnnnnnnnnnnnnnnnnnnnnnnnnnnnnnnnnnnnnnnnnnnnnnnnnnnnnnnnnnnnnnnnnnnnnnnnnnnnnnnnnnnnnnnnnnnnnnnnnnnnnnnnnnnnnnnnnnnnnnnnnnnnnnnnnnnnnnnnnnnnnnnnnnnnnnnnnnnnnnnnnnnnnnnnnnnnnnnnnnnnnnnnnnnnnnnnnnnnnnnnnnnnnnnnnnnnnnnnnnnnnnnnnnnnnnnnnnnnnnnnnnnnnnnnnnnnnnnnnnnnnnnnnnnnnnnnnnnnnnnnnnnnnnnnnnnnnnnnnnnnnnnnnnnnnnnnnnnnnnnnnnnnnnnnnnnnnnnnnnnnnnnnnnnnnnnnnnnnnnnnnnnnnnnnnnnnnnnnnnnnnnnnnnnnnnnnnnnnnnnnnnnnnnnnnnnnnnnnnnnnnnnnnnnnnnnnnnnnnnnnnnnnnnnnnnnnnnnnnnnnnnnnnnnnnnnnnnnnnnnnnnnnnnnnnnnnnnnnnnnnnnnnnnnnnnnnnnnnnnnnnnnnnnnnnnnnnnnnnnnnnnnnnnnnnnnnnnnnnnnnnnnnnnnnnnnnnnnnnnnnnnnnnnnnnnnnnnnnnnnnnnnnnnnnnnnnnnnnnnnnnnnnnnnnnnnnnnnnnnnnnnnnnnnnnnnnnnnnnnnnnnnnnnnnnnnnnnnnnnnnnnnnnnnnnnnnnnnnnnnnnnnnnnnnnnnnnnnnnnnnnnnnnnnnnnnnnnnnnnnnnnnnnnnnnnnnnnnnnnnnnnnnnnnnnnnnnnnnnnnnnnnnnnnnnnnnnnnnnnnnnnnnnnnnnnnnnnnnnnnnnnnnnnnnnnnnnnnnnnnnnnnnnnnnnnnnnnnnnnnnnnnnnnnnnnnnnnnnnnnnnnnnnnnnnnnnnnnnnnnnnnnnnnnnnnnnnnnnnnnnnnnnnnnnnnnnnnnnnnnnnnnnnnnnnnnnnnnnnnnnnnnnnnnnnnnnnnnnnnnnnnnnnnnnnnnnnnnnnnnnnnnnnnnnnnnnnnnnnnnnnnnnnnnnnnnnnnnnnnnnnnnnnnnnnnnnnnnnnnnnnnnnnnnnnnnnnnnnnnnnnnnnnnnnnnnnnnnnnnnnnnnnnnnnnnnnnnnnnnnnnnnnnnnnnnnnnnnnnnnnnnnnnnnnnnnnnnnnnnnnnnnnnnnnnnnnnnnnnnnnnnnnnnnnnnnnnnnnnnnnnnnnnnnnnnnnnnnnnnnnnnnnnnnnnnnnnnnnnnnnnnnnnnnnnnnnnnnnnnnnnnnnnnnnnnnnnnnnnnnnnnnnnnnnnnnnnnnnnnnnnnnnnnnnnnnnnnnnnnnnnnnnnnnnnnnnnnnnnnnnnnnnnnnnnnnnnnnnnnnnnnnnnnnnnnnnnnnnnnnnnnnnnnnnnnnnnnnnnnnnnnnnnnnnnnnnnnnnnnnnnnnnnnnnnnnnnnnnnnnnnnnnnnnnnnnnnnnnnnnnnnnnnnnnnnnnnnnnnnnnnnnnnnnnnnnnnnnnnnnnnnnnnnnnnnnnnnnnnnnnnnnnnnnnnnnnnnnnnnnnnnnnnnnnnnnnnnnnnnnnnnnnnnnnnnnnnnnnnnnnnnnnnnnnnnnnnnnnnnnnnnnnnnnnnnnnnnnnnnnnnnnnnnnnnnnnnnnnnnnnnnnnnnnnnnnnnnnnnnnnnnnnnnnnnnnnnnnnnnnnnnnnnnnnnnnnnnnnnnnnnnnnnnnnnnnnnnnnnnnnnnnnnnnnnnnnnnnnnnnnnnnnnnnnnnnnnnnnnnnnnnnnnnnnnnnnnnnnnnnnnnnnnnnnnnnnnnnnnnnnnnnnnnnnnnnnnnnnnnnnnnnnnnnnnnnnnnnnnnnnnnnnnnnnnnnnnnnnnnnnnnnnnnnnnnnnnnnnnnnnnnnnnnnnnnnnnnnnnnnnnnnnnnnnnnnnnnnnnnnnnnnnnnnnnnnnnnnnnnnnnnnnnnnnnnnnnnnnnnnnnnnnnnnnnnnnnnnnnnnnnnnnnnnnnnnnnnnnnnnnnnnnnnnnnnnnnnnnnnnnnnnnnnnnnnnnnnnnnnnnnnnnnnnnnnnnnnnnnnnnnnnnnnnnnnnnnnnnnnnnnnnnnnnnnnnnnnnnnnnnnnnnnnnnnnnnnnnnnnnnnnnnnnnnnnnnnnnnnnnnnnnnnnnnnnnnnnnnnnnnnnnnnnnnnnnnnnnnnnnnnnnnnnnnnnnnnnnnnnnnnnnnnnnnnnnnnnnnnnnnnnnnnnnnnnnnnnnnnnnnnnnnnnnnnnnnnnnnnnnnnnnnnnnnnnnnnnnnnnnnnnnnnnnnnnnnnnnnnnnnnnnnnnnnnnnnnnnnnnnnnnnnnnnnnnnnnnnnnnnnnnnnnnnnnnnnnnnnnnnnnnnnnnnnnnnnnnnnnnnnnnnnnnnnnnnnnnnnnnnnnnnnnnnnnnnnnnnnnnnnnnnnnnnnnnnnnnnnnnnnnnnnnnnnnnnnnnnnnnnnnnnnnnnnnnnnnnnnnnnnnnnnnnnnnnnnnnnnnnnnnnnnnnnnnnnnnnnnnnnnnnnnnnnnnnnnnnnnnnnnnnnnnnnnnnnnnnnnnnnnnnnnnnnnnnnnnnnnnnnnnnnnnnnnnnnnnnnnnnnnnnnnnnnnnnnnnnnnnnnnnnnnnnnnnnnnnnnnnnnnnnnnnnnnnnnnnnnnnnnnnnnnnnnnnnnnnnnnnnnnnnnnnnnnnnnnnnnnnnnnnnnnnnnnnnnnnnnnnnnnnnnnnnnnnnnnnnnnnnnnnnnnnnnnnnnnnnnnnnnnnnnnnnnnnnnnnnnnnnnnnnnnnnnnnnnnnnnnnnnnnnnnnnnnnnnnnnnnnnnnnnnnnnnnnnnnnnnnnnnnnnnnnnnnnnnnnnnnnnnnnnnnnnnnnnnnnnnnnnnnnnnnnnnnnnnnnnnnnnnnnnnnnnnnnnnnnnnnnnnnnnnnnnnnnnnnnnnnnnnnnnnnnnnnnnnnnnnnnnnnnnnnnnnnnnnnnnnnnnnnnnnnnnnnnnnnnnnnnnnnnnnnnnnnnnnnnnnnnnnnnnnnnnnnnnnnnnnnnnnnnnnnnnnnnnnnnnnnnnnnnnnnnnnnnnnnnnnnnnnnnnnnnnnnnnnnnnnnnnnnnnnnnnnnnnnnnnnnnnnnnnnnnnnnnnnnnnnnnnnnnnnnnnnnnnnnnnnnnnnnnnnnnnnnnnnnnnnnnnnnnnnnnnnnnnnnnnnnnnnnnnnnnnnnnnnnnnnnnnnnnnnnnnnnnnnnnnnnnnnnnnnnnnnnnnnnnnnnnnnnnnnnnnnnnnnnnnnnnnnnnnnnnnnnnnnnnnnnnnnnnnnnnnnnnnnnnnnnnnnnnnnnnnnnnnnnnnnnnnnnnnnnnnnnnnnnnnnnnnnnnnnnnnnnnnnnnnnnnnnnnnnnnnnnnnnnnnnnnnnnnnnnnnnnnnnnnnnnnnnnnnnnnnnnnnnnnnnnnnnnnnnnnnnnnnnnnnnnnnnnnnnnnnnnnnnnnnnnnnnnnnnnnnnnnnnnnnnnnnnnnnnnnnnnnnnnnnnnnnnnnnnnnnnnnnnnnnnnnnnnnnnnnnnnnnnnnnnnnnnnnnnnnnnnnnnnnnnnnnnnnnnnnnnnnnnnnnnnnnnnnnnnnnnnnnnnnnnnnnnnnnnnnnnnnnnnnnnnnnnnnnnnnnnnnnnnnnnnnnnnnnnnnnnnnnnnnnnnnnnnnnnnnnnnnnnnnnnnnnnnnnnnnnnnnnnnnnnnnnnnnnnnnnnnnnnnnnnnnnnnnnnnnnnnnnnnnnnnnnnnnnnnnnnnnnnnnnnnnnnnnnnnnnnnnnnnnnnnnnnnnnnnnnnnnnnnnnnnnnnnnnnnnnnnnnnnnnnnnnnnnnnnnnnnnnnnnnnnnnnnnnnnnnnnnnnnnnnnnnnnnnnnnnnnnnnnnnnnnnnnnnnnnnnnnnnnnnnnnnnnnnnnnnnnnnnnnnnnnnnnnnnnnnnnnnnnnnnnnnnnnnnnnnnnnnnnnnnnnnnnnnnnnnnnnnnnnnnnnnnnnnnnnnnnnnnnnnnnnnnnnnnnnnnnnnnnnnnnnnnnnnnnnnnnnnnnnnnnnnnnnnnnnnnnnnnnnnnnnnnnnnnnnnnnnnnnnnnnnnnnnnnnnnnnnnnnnnnnnnnnnnnnnnnnnnnnnnnnnnnnnnnnnnnnnnnnnnnnnnnnnnnnnnnnnnnnnnnnnnnnnnnnnnnnnnnnnnnnnnnnnnnnnnnnnnnnnnnnnnnnnnnnnnnnnnnnnnnnnnnnnnnnnnnnnnnnnnnnnnnnnnnnnnnnnnnnnnnnnnnnnnnnnnnnnnnnnnnnnnnnnnnnnnnnnnnnnnnnnnnnnnnnnnnnnnnnnnnnnnnnnnnnnnnnnnnnnnnnnnnnnnnnnnnnnnnnnnnnnnnnnnnnnnnnnnnnnnnnnnnnnnnnnnnnnnnnnnnnnnnnnnnnnnnnnnnnnnnnnnnnnnnnnnnnnnnnnnnnnnnnnnnnnnnnnnnnnnnnnnnnnnnnnnnnnnnnnnnnnnnnnnnnnnnnnnnnnnnnnnnnnnnnnnnnnnnnnnnnnnnnnnnnnnnnnnnnnnnnnnnnnnnnnnnnnnnnnnnnnnnnnnnnnnnnnnnnnnnnnnnnnnnnnnnnnnnnnnnnnnnnnnnnnnnnnnnnnnnnnnnnnnnnnnnnnnnnnnnnnnnnnnnnnnnnnnnnnnnnnnnnnnnnnnnnnnnnnnnnnnnnnnnnnnnnnnnnnnnnnnnnnnnnnnnnnnnnnnnnnnnnnnnnnnnnnnnnnnnnnnnnnnnnnnnnnnnnnnnnnnnnnnnnnnnnnnnnnnnnnnnnnnnnnnnnnnnnnnnnnnnnnnnnnnnnnnnnnnnnnnnnnnnnnnnnnnnnnnnnnnnnnnnnnnnnnnnnnnnnnnnnnnnnnnnnnnnnnnnnnnnnnnnnnnnnnnnnnnnnnnnnnnnnnnnnnnnnnnnnnnnnnnnnnnnnnnnnnnnnnnnnnnnnnnnnnnnnnnnnnnnnnnnnnnnnnnnnnnnnnnnnnnnnnnnnnnnnnnnnnnnnnnnnnnnnnnnnnnnnnnnnnnnnnnnnnnnnnnnnnnnnnnnnnnnnnnnnnnnnnnnnnnnnnnnnnnnnnnnnnnnnnnnnnnnnnnnnnnnnnnnnnnnnnnnnnnnnnnnnnnnnnnnnnnnnnnnnnnnnnnnnnnnnnnnnnnnnnnnnnnnnnnnnnnnnnnnnnnnnnnnnnnnnnnnnnnnnnnnnnnnnnnnnnnnnnnnnnnnnnnnnnnnnnnnnnnnnnnnnnnnnnnnnnnnnnnnnnnnnnnnnnnnnnnnnnnnnnnnnnnnnnnnnnnnnnnnnnnnnnnnnnnnnnnnnnnnnnnnnnnnnnnnnnnnnnnnnnnnnnnnnnnnnnnnnnnnnnnnnnnnnnnnnnnnnnnnnnnnnnnnnnnnnnnnnnnnnnnnnnnnnnnnnnnnnnnnnnnnnnnnnnnnnnnnnnnnnnnnnnnnnnnnnnnnnnnnnnnnnnnnnnnnnnnnnnnnnnnnnnnnnnnnnnnnnnnnnnnnnnnnnnnnnnnnnnnnnnnnnnnnnnnnnnnnnnnnnnnnnnnnnnnnnnnnnnnnnnnnnnnnnnnnnnnnnnnnnnnnnnnnnnnnnnnnnnnnnnnnnnnnnnnnnnnnnnnnnnnnnnnnnnnnnnnnnnnnnnnnnnnnnnnnnnnnnnnnnnnnnnnnnnnnnnnnnnnnnnnnnnnnnnnnnnnnnnnnnnnnnnnnnnnnnnnnnnnnnnnnnnnnnnnnnnnnnnnnnnnnnnnnnnnnnnnnnnnnnnnnnnnnnnnnnnnnnnnnnnnnnnnnnnnnnnnnnnnnnnnnnnnnnnnnnnnnnnnnnnnnnnnnnnnnnnnnnnnnnnnnnnnnnnnnnnnnnnnnnnnnnnnnnnnnnnnnnnnnnnnnnnnnnnnnnnnnnnnnnnnnnnnnnnnnnnnnnnnnnnnnnnnnnnnnnnnnnnnnnnnnnnnnnnnnnnnnnnnnnnnnnnnnnnnnnnnnnnnnnnnnnnnnnnnnnnnnnnnnnnnnnnnnnnnnnnnnnnnnnnnnnnnnnnnnnnnnnnnnnnnnnnnnnnnnnnnnnnnnnnnnnnnnnnnnnnnnnnnnnnnnnnnnnnnnnnnnnnnnnnnnnnnnnnnnnnnnnnnnnnnnnnnnnnnnnnnnnnnnnnnnnnnnnnnnnnnnnnnnnnnnnnnnnnnnnnnnnnnnnnnnnnnnnnnnnnnnnnnnnnnnnnnnnnnnnnnnnnnnnnnnnnnnnnnnnnnnnnnnnnnnnnnnnnnnnnnnnnnnnnnnnnnnnnnnnnnnnnnnnnnnnnnnnnnnnnnnnnnnnnnnnnnnnnnnnnnnnnnnnnnnnnnnnnnnnnnnnnnnnnnnnnnnnnnnnnnnnnnnnnnnnnnnnnnnnnnnnnnnnnnnnnnnnnnnnnnnnnnnnnnnnnnnnnnnnnnnnnnnnnnnnnnnnnnnnnnnnnnnnnnnnnnnnnnnnnnnnnnnnnnnnnnnnnnnnnnnnnnnnnnnnnnnnnnnnnnnnnnnnnnnnnnnnnnnnnnnnnnnnnnnnnnnnnnnnnnnnnnnnnnnnnnnnnnnnnnnnnnnnnnnnnnnnnnnnnnnnnnnnnnnnnnnnnnnnnnnnnnnnnnnnnnnnnnnnnnnnnnnnnnnnnnnnnnnnnnnnnnnnnnnnnnnnnnnnnnnnnnnnnnnnnnnnnnnnnnnnnnnnnnnnnnnnnnnnnnnnnnnnnnnnnnnnnnnnnnnnnnnnnnnnnnnnnnnnnnnnnnnnnnnnnnnnnnnnnnnnnnnnnnnnnnnnnnnnnnnnnnnnnnnnnnnnnnnnnnnnnnnnnnnnnnnnnnnnnnnnnnnnnnnnnnnnnnnnnnnnnnnnnnnnnnnnnnnnnnnnnnnnnnnnnnnnnnnnnnnnnnnnnnnnnnnnnnnnnnnnnnnnnnnnnnnnnnnnnnnnnnnnnnnnnnnnnnnnnnnnnnnnnnnnnnnnnnnnnnnnnnnnnnnnnnnnnnnnnnnnnnnnnnnnnnnnnnnnnnnnnnnnnnnnnnnnnnnnnnnnnnnnnnnnnnnnnnnnnnnnnnnnnnnnnnnnnnnnnnnnnnnnnnnnnnnnnnnnnnnnnnnnnnnnnnnnnnnnnnnnnnnnnnnnnnnnnnnnnnnnnnnnnnnnnnnnnnnnnnnnnnnnnnnnnnnnnnnnnnnnnnnnnnnnnnnnnnnnnnnnnnnnnnnnnnnnnnnnnnnnnnnnnnnnnnnnnnnnnnnnnnnnnnnnnnnnnnnnnnnnnnnnnnnnnnnnnnnnnnnnnnnnnnnnnnnnnnnnnnnnnnnnnnnnnnnnnnnnnnnnnnnnnnnnnnnnnnnnnnnnnnnnnnnnnnnnnnnnnnnnnnnnnnnnnnnnnnnnnnnnnnnnnnnnnnnnnnnnnnnnnnnnnnnnnnnnnnnnnnnnnnnnnnnnnnnnnnnnnnnnnnnnnnnnnnnnnnnnnnnnnnnnnnnnnnnnnnnnnnnnnnnnnnnnnnnnnnnnnnnnnnnnnnnnnnnnnnnnnnnnnnnnnnnnnnnnnnnnnnnnnnnnnnnnnnnnnnnnnnnnnnnnnnnnnnnnnnnnnnnnnnnnnnnnnnnnnnnnnnnnnnnnnnnnnnnnnnnnnnnnnnnnnnnnnnnnnnnnnnnnnnnnnnnnnnnnnnnnnnnnnnnnnnnnnnnnnnnnnnnnnnnnnnnnnnnnnnnnnnnnnnnnnnnnnnnnnnnnnnnnnnnnnnnnnnnnnnnnnnnnnnnnnnnnnnnnnnnnnnnnnnnnnnnnnnnnnnnnnnnnnnnnnnnnnnnnnnnnnnnnnnnnnnnnnnnnnnnnnnnnnnnnnnnnnnnnnnnnnnnnnnnnnnnnnnnnnnnnnnnnnnnnnnnnnnnnnnnnnnnnnnnnnnnnnnnnnnnnnnnnnnnnnnnnnnnnnnnnnnnnnnnnnnnnnnnnnnnnnnnnnnnnnnnnnnnnnnnnnnnnnnnnnnnnnnnnnnnnnnnnnnnnnnnnnnnnnnnnnnnnnnnnnnnnnnnnnnnnnnnnnnnnnnnnnnnnnnnnnnnnnnnnnnnnnnnnnnnnnnnnnnnnnnnnnnnnnnnnnnnnnnnnnnnnnnnnnnnnnnnnnnnnnnnnnnnnnnnnnnnnnnnnnnnnnnnnnnnnnnnnnnnnnnnnnnnnnnnnnnnnnnnnnnnnnnnnnnnnnnnnnnnnnnnnnnnnnnnnnnnnnnnnnnnnnnnnnnnnnnnnnnnnnnnnnnnnnnnnnnnnnnnnnnnnnnnnnnnnnnnnnnnnnnnnnnnnnnnnnnnnnnnnnnnnnnnnnnnnnnnnnnnnnnnnnnnnnnnnnnnnnnnnnnnnnnnnnnnnnnnnnnnnnnnnnnnnnnnnnnnnnnnnnnnnnnnnnnnnnnnnnnnnnnnnnnnnnnnnnnnnnnnnnnnnnnnnnnnnnnnnnnnnnnnnnnnnnnnnnnnnnnnnnnnnnnnnnnnnnnnnnnnnnnnnnnnnnnnnnnnnnnnnnnnnnnnnnnnnnnnnnnnnnnnnnnnnnnnnnnnnnnnnnnnnnnnnnnnnnnnnnnnnnnnnnnnnnnnnnnnnnnnnnnnnnnnnnnnnnnnnnnnnnnnnnnnnnnnnnnnnnnnnnnnnnnnnnnnnnnnnnnnnnnnnnnnnnnnnnnnnnnnnnnnnnnnnnnnnnnnnnnnnnnnnnnnnnnnnnnnnnnnnnnnnnnnnnnnnnnnnnnnnnnnnnnnnnnnnnnnnnnnnnnnnnnnnnnnnnnnnnnnnnnnnnnnnnnnnnnnnnnnnnnnnnnnnnnnnnnnnnnnnnnnnnnnnnnnnnnnnnnnnnnnnnnnnnnnnnnnnnnnnnnnnnnnnnnnnnnnnnnnnnnnnnnnnnnnnnnnnnnnnnnnnnnnnnnnnnnnnnnnnnnnnnnnnnnnnnnnnnnnnnnnnnnnnnnnnnnnnnnnnnnnnnnnnnnnnnnnnnnnnnnnnnnnnnnnnnnnnnnnnnnnnnnnnnnnnnnnnnnnnnnnnnnnnnnnnnnnnnnnnnnnnnnnnnnnnnnnnnnnnnnnnnnnnnnnnnnnnnnnnnnnnnnnnnnnnnnnnnnnnnnnnnnnnnnnnnnnnnnnnnnnnnnnnnnnnnnnnnnnnnnnnnnnnnnnnnnnnnnnnnnnnnnnnnnnnnnnnnnnnnnnnnnnnnnnnnnnnnnnnnnnnnnnnnnnnnnnnnnnnnnnnnnnnnnnnnnnnnnnnnnnnnnnnnnnnnnnnnnnnnnnnnnnnnnnnnnnnnnnnnnnnnnnnnnnnnnnnnnnnnnnnnnnnnnnnnnnnnnnnnnnnnnnnnnnnnnnnnnnnnnnnnnnnnnnnnnnnnnnnnnnnnnnnnnnnnnnnnnnnnnnnnnnnnnnnnnnnnnnnnnnnnnnnnnnnnnnnnnnnnnnnnnnnnnnnnnnnnnnnnnnnnnnnnnnnnnnnnnnnnnnnnnnnnnnnnnnnnnnnnnnnnnnnnnnnnnnnnnnnnnnnnnnnnnnnnnnnnnnnnnnnnnnnnnnnnnnnnnnnnnnnnnnnnnnnnnnnnnnnnnnnnnnnnnnnnnnnnnnnnnnnnnnnnnnnnnnnnnnnnnnnnnnnnnnnnnnnnnnnnnnnnnnnnnnnnnnnnnnnnnnnnnnnnnnnnnnnnnnnnnnnnnnnnnnnnnnnnnnnnnnnnnnnnnnnnnnnnnnnnnnnnnnnnnnnnnnnnnnnnnnnnnnnnnnnnnnnnnnnnnnnnnnnnnnnnnnnnnnnnnnnnnnnnnnnnnnnnnnnnnnnnnnnnnnnnnnnnnnnnnnnnnnnnnnnnnnnnnnnnnnnnnnnnnnnnnnnnnnnnnnnnnnnnnnnnnnnnnnnnnnnnnnnnnnnnnnnnnnnnnnnnnnnnnnnnnnnnnnnnnnnnnnnnnnnnnnnnnnnnnnnnnnnnnnnnnnnnnnnnnnnnnnnnnnnnnnnnnnnnnnnnnnnnnnnnnnnnnnnnnnnnnnnnnnnnnnnnnnnnnnnnnnnnnnnnnnnnnnnnnnnnnnnnnnnnnnnnnnnnnnnnnnnnnnnnnnnnnnnnnnnnnnnnnnnnnnnnnnnnnnnnnnnnnnnnnnnnnnnnnnnnnnnnnnnnnnnnnnnnnnnnnnnnnnnnnnnnnnnnnnnnnnnnnnnnnnnnnnnnnnnnnnnnnnnnnnnnnnnnnnnnnnnnnnnnnnnnnnnnnnnnnnnnnnnnnnnnnnnnnnnnnnnnnnnnnnnnnnnnnnnnnnnnnnnnnnnnnnnnnnnnnnnnnnnnnnnnnnnnnnnnnnnnnnnnnnnnnnnnnnnnnnnnnnnnnnnnnnnnnnnnnnnnnnnnnnnnnnnnnnnnnnnnnnnnnnnnnnnnnnnnnnnnnnnnnnnnnnnnnnnnnnnnnnnnnnnnnnnnnnnnnnnnnnnnnnnnnnnnnnnnnnnnnnnnnnnnnnnnnnnnnnnnnnnnnnnnnnnnnnnnnnnnnnnnnnnnnnnnnnnnnnnnnnnnnnnnnnnnnnnnnnnnnnnnnnnnnnnnnnnnnnnnnnnnnnnnnnnnnnnnnnnnnnnnnnnnnnnnnnnnnnnnnnnnnnnnnnnnnnnnnnnnnnnnnnnnnnnnnnnnnnnnnnnnnnnnnnnnnnnnnnnnnnnnnnnnnnnnnnnnnnnnnnnnnnnnnnnnnnnnnnnnnnnnnnnnnnnnnnnnnnnnnnnnnnnnnnnnnnnnnnnnnnnnnnnnnnnnnnnnnnnnnnnnnnnnnnnnnnnnnnnnnnnnnnnnnnnnnnnnnnnnnnnnnnnnnnnnnnnnnnnnnnnnnnnnnnnnnnnnnnnnnnnnnnnnnnnnnnnnnnnnnnnnnnnnnnnnnnnnnnnnnnnnnnnnnnnnnnnnnnnnnnnnnnnnnnnnnnnnnnnnnnnnnnnnnnnnnnnnnnnnnnnnnnnnnnnnnnnnnnnnnnnnnnnnnnnnnnnnnnnnnnnnnnnnnnnnnnnnnnnnnnnnnnnnnnnnnnnnnnnnnnnnnnnnnnnnnnnnnnnnnnnnnnnnnnnnnnnnnnnnnnnnnnnnnnnnnnnnnnnnnnnnnnnnnnnnnnnnnnnnnnnnnnnnnnnnnnnnnnnnnnnnnnnnnnnnnnnnnnnnnnnnnnnnnnnnnnnnnnnnnnnnnnnnnnnnnnnnnnnnnnnnnnnnnnnnnnnnnnnnnnnnnnnnnnnnnnnnnnnnnnnnnnnnnnnnnnnnnnnnnnnnnnnnnnnnnnnnnnnnnnnnnnnnnnnnnnnnnnnnnnnnnnnnnnnnnnnnnnnnnnnnnnnnnnnnnnnnnnnnnnnnnnnnnnnnnnnnnnnnnnnnnnnnnnnnnnnnnnnnnnnnnnnnnnnnnnnnnnnnnnnnnnnnnnnnnnnnnnnnnnnnnnnnnnnnnnnnnnnnnnnnnnnnnnnnnnnnnnnnnnnnnnnnnnnnnnnnnnnnnnnnnnnnnnnnnnnnnnnnnnnnnnnnnnnnnnnnnnnnnnnnnnnnnnnnnnnnnnnnnnnnnnnnnnnnnnnnnnnnnnnnnnnnnnnnnnnnnnnnnnnnnnnnnnnnnnnnnnnnnnnnnnnnnnnnnnnnnnnnnnnnnnnnnnnnnnnnnnnnnnnnnnnnnnnnnnnnnnnnnnnnnnnnnnnnnnnnnnnnnnnnnnnnnnnnnnnnnnnnnnnnnnnnnnnnnnnnnnnnnnnnnnnnnnnnnnnnnnnnnnnnnnnnnnnnnnnnnnnnnnnnnnnnnnnnnnnnnnnnnnnnnnnnnnnnnnnnnnnnnnnnnnnnnnnnnnnnnnnnnnnnnnnnnnnnnnnnnnnnnnnnnnnnnnnnnnnnnnnnnnnnnnnnnnnnnnnnnnnnnnnnnnnnnnnnnnnnnnnnnnnnnnnnnnnnnnnnnnnnnnnnnnnnnnnnnnnnnnnnnnnnnnnnnnnnnnnnnnnnnnnnnnnnnnnnnnnnnnnnnnnnnnnnnnnnnnnnnnnnnnnnnnnnnnnnnnnnnnnnnnnnnnnnnnnnnnnnnnnnnnnnnnnnnnnnnnnnnnnnnnnnnnnnnnnnnnnnnnnnnnnnnnnnnnnnnnnnnnnnnnnnnnnnnnnnnnnnnnnnnnnnnnnnnnnnnnnnnnnnnnnnnnnnnnnnnnnnnnnnnnnnnnnnnnnnnnnnnnnnnnnnnnnnnnnnnnnnnnnnnnnnnnnnnnnnnnnnnnnnnnnnnnnnnnnnnnnnnnnnnnnnnnnnnnnnnnnnnnnnnnnnnnnnnnnnnnnnnnnnnnnnnnnnnnnnnnnnnnnnnnnnnnnnnnnnnnnnnnnnnnnnnnnnnnnnnnnnnnnnnnnnnnnnnnnnnnnnnnnnnnnnnnnnnnnnnnnnnnnnnnnnnnnnnnnnnnnnnnnnnnnnnnnnnnnnnnnnnnnnnnnnnnnnnnnnnnnnnnnnnnnnnnnnnnnnnnnnnnnnnnnnnnnnnnnnnnnnnnnnnnnnnnnnnnnnnnnnnnnnnnnnnnnnnnnnnnnnnnnnnnnnnnnnnnnnnnnnnnnnnnnnnnnnnnnnnnnnnnnnnnnnnnnnnnnnnnnnnnnnnnnnnnnnnnnnnnnnnnnnnnnnnnnnnnnnnnnnnnnnnnnnnnnnnnnnnnnnnnnnnnnnnnnnnnnnnnnnnnnnnnnnnnnnnnnnnnnnnnnnnnnnnnnnnnnnnnnnnnnnnnnnnnnnnnnnnnnnnnnnnnnnnnnnnnnnnnnnnnnnnnnnnnnnnnnnnnnnnnnnnnnnnnnnnnnnnnnnnnnnnnnnnnnnnnnnnnnnnnnnnnnnnnnnnnnnnnnnnnnnnnnnnnnnnnnnnnnnnnnnnnnnnnnnnnnnnnnnnnnnnnnnnnnnnnnnnnnnnnnnnnnnnnnnnnnnnnnnnnnnnnnnnnnnnnnnnnnnnnnnnnnnnnnnnnnnnnnnnnnnnnnnnnnnnnnnnnnnnnnnnnnnnnnnnnnnnnnnnnnnnnnnnnnnnnnnnnnnnnnnnnnnnnnnnnnnnnnnnnnnnnnnnnnnnnnnnnnnnnnnnnnnnnnnnnnnnnnnnnnnnnnnnnnnnnnnnnnnnnnnnnnnnnnnnnnnnnnnnnnnnnnnnnnnnnnnnnnnnnnnnnnnnnnnnnnnnnnnnnnnnnnnnnnnnnnnnnnnnnnnnnnnnnnnnnnnnnnnnnnnnnnnnnnnnnnnnnnnnnnnnnnnnnnnnnnnnnnnnnnnnnnnnnnnnnnnnnnnnnnnnnnnnnnnnnnnnnnnnnnnnnnnnnnnnnnnnnnnnnnnnnnnnnnnnnnnnnnnnnnnnnnnnnnnnnnnnnnnnnnnnnnnnnnnnnnnnnnnnnnnnnnnnnnnnnnnnnnnnnnnnnnnnnnnnnnnnnnnnnnnnnnnnnnnnnnnnnnnnnnnnnnnnnnnnnnnnnnnnnnnnnnnnnnnnnnnnnnnnnnnnnnnnnnnnnnnnnnnnnnnnnnnnnnnnnnnnnnnnnnnnnnnnnnnnnnnnnnnnnnnnnnnnnnnnnnnnnnnnnnnnnnnnnnnnnnnnnnnnnnnnnnnnnnnnnnnnnnnnnnnnnnnnnnnnnnnnnnnnnnnnnnnnnnnnnnnnnnnnnnnnnnnnnnnnnnnnnnnnnnnnnnnnnnnnnnnnnnnnnnnnnnnnnnnnnnnnnnnnnnnnnnnnnnnnnnnnnnnnnnnnnnnnnnnnnnnnnnnnnnnnnnnnnnnnnnnnnnnnnnnnnnnnnnnnnnnnnnnnnnnnnnnnnnnnnnnnnnnnnnnnnnnnnnnnnnnnnnnnnnnnnnnnnnnnnnnnnnnnnnnnnnnnnnnnnnnnnnnnnnnnnnnnnnnnnnnnnnnnnnnnnnnnnnnnnnnnnnnnnnnnnnnnnnnnnnnnnnnnnnnnnnnnnnnnnnnnnnnnnnnnnnnnnnnnnnnnnnnnnnnnnnnnnnnnnnnnnnnnnnnnnnnnnnnnnnnnnnnnnnnnnnnnnnnnnnnnnnnnnnnnnnnnnnnnnnnnnnnnnnnnnnnnnnnnnnnnnnnnnnnnnnnnnnnnnnnnnnnnnnnnnnnnnnnnnnnnnnnnnnnnnnnnnnnnnnnnnnnnnnnnnnnnnnnnnnnnnnnnnnnnnnnnnnnnnnnnnnnnnnnnnnnnnnnnnnnnnnnnnnnnnnnnnnnnnnnnnnnnnnnnnnnnnnnnnnnnnnnnnnnnnnnnnnnnnnnnnnnnnnnnnnnnnnnnnnnnnnnnnnnnnnnnnnnnnnnnnnnnnnnnnnnnnnnnnnnnnnnnnnnnnnnnnnnnnnnnnnnnnnnnnnnnnnnnnnnnnnnnnnnnnnnnnnnnnnnnnnnnnnnnnnnnnnnnnnnnnnnnnnnnnnnnnnnnnnnnnnnnnnnnnnnnnnnnnnnnnnnnnnnnnnnnnnnnnnnnnnnnnnnnnnnnnnnnnnnnnnnnnnnnnnnnnnnnnnnnnnnnnnnnnnnnnnnnnnnnnnnnnnnnnnnnnnnnnnnnnnnnnnnnnnnnnnnnnnnnnnnnnnnnnnnnnnnnnnnnnnnnnnnnnnnnnnnnnnnnnnnnnnnnnnnnnnnnnnnnnnnnnnnnnnnnnnnnnnnnnnnnnnnnnnnnnnnnnnnnnnnnnnnnnnnnnnnnnnnnnnnnnnnnnnnnnnnnnnnnnnnnnnnnnnnnnnnnnnnnnnnnnnnnnnnnnnnnnnnnnnnnnnnnnnnnnnnnnnnnnnnnnnnnnnnnnnnnnnnnnnnnnnnnnnnnnnnnnnnnnnnnnnnnnnnnnnnnnnnnnnnnnnnnnnnnnnnnnnnnnnnnnnnnnnnnnnnnnnnnnnnnnnnnnnnnnnnnnnnnnnnnnnnnnnnnnnnnnnnnnnnnnnnnnnnnnnnnnnnnnnnnnnnnnnnnnnnnnnnnnnnnnnnnnnnnnnnnnnnnnnnnnnnnnnnnnnnnnnnnnnnnnnnnnnnnnnnnnnnnnnnnnnnnnnnnnnnnnnnnnnnnnnnnnnnnnnnnnnnnnnnnnnnnnnnnnnnnnnnnnnnnnnnnnnnnnnnnnnnnnnnnnnnnnnnnnnnnnnnnnnnnnnnnnnnnnnnnnnnnnnnnnnnnnnnnnnnnnnnnnnnnnnnnnnnnnnnnnnnnnnnnnnnnnnnnnnnnnnnnnnnnnnnnnnnnnnnnnnnnnnnnnnnnnnnnnnnnnnnnnnnnnnnnnnnnnnnnnnnnnnnnnnnnnnnnnnnnnnnnnnnnnnnnnnnnnnnnnnnnnnnnnnnnnnnnnnnnnnnnnnnnnnnnnnnnnnnnnnnnnnnnnnnnnnnnnnnnnnnnnnnnnnnnnnnnnnnnnnnnnnnnnnnnnnnnnnnnnnnnnnnnnnnnnnnnnnnnnnnnnnnnnnnnnnnnnnnnnnnnnnnnnnnnnnnnnnnnnnnnnnnnnnnnnnnnnnnnnnnnnnnnnnnnnnnnnnnnnnnnnnnnnnnnnnnnnnnnnnnnnnnnnnnnnnnnnnnnnnnnnnnnnnnnnnnnnnnnnnnnnnnnnnnnnnnnnnnnnnnnnnnnnnnnnnnnnnnnnnnnnnnnnnnnnnnnnnnnnnnnnnnnnnnnnnnnnnnnnnnnnnnnnnnnnnnnnnnnnnnnnnnnnnnnnnnnnnnnnnnnnnnnnnnnnnnnnnnnnnnnnnnnnnnnnnnnnnnnnnnnnnnnnnnnnnnnnnnnnnnnnnnnnnnnnnnnnnnnnnnnnnnnnnnnnnnnnnnnnnnnnnnnnnnnnnnnnnnnnnnnnnnnnnnnnnnnnnnnnnnnnnnnnnnnnnnnnnnnnnnnnnnnnnnnnnnnnnnnnnnnnnnnnnnnnnnnnnnnnnnnnnnnnnnnnnnnnnnnnnnnnnnnnnnnnnnnnnnnnnnnnnnnnnnnnnnnnnnnnnnnnnnnnnnnnnnnnnnnnnnnnnnnnnnnnnnnnnnnnnnnnnnnnnnnnnnnnnnnnnnnnnnnnnnnnnnnnnnnnnnnnnnnnnnnnnnnnnnnnnnnnnnnnnnnnnnnnnnnnnnnnnnnnnnnnnnnnnnnnnnnnnnnnnnnnnnnnnnnnnnnnnnnnnnnnnnnnnnnnnnnnnnnnnnnnnnnnnnnnnnnnnnnnnnnnnnnnnnnnnnnnnnnnnnnnnnnnnnnnnnnnnnnnnnnnnnnnnnnnnnnnnnnnnnnnnnnnnnnnnnnnnnnnnnnnnnnnnnnnnnnnnnnnnnnnnnnnnnnnnnnnnnnnnnnnnnnnnnnnnnnnnnnnnnnnnnnnnnnnnnnnnnnnnnnnnnnnnnnnnnnnnnnnnnnnnnnnnnnnnnnnnnnnnnnnnnnnnnnnnnnnnnnnnnnnnnnnnnnnnnnnnnnnnnnnnnnnnnnnnnnnnnnnnnnnnnnnnnnnnnnnnnnnnnnnnnnnnnnnnnnnnnnnnnnnnnnnnnnnnnnnnnnnnnnnnnnnnnnnnnnnnnnnnnnnnnnnnnnnnnnnnnnnnnnnnnnnnnnnnnnnnnnnnnnnnnnnnnnnnnnnnnnnnnnnnnnnnnnnnnnnnnnnnnnnnnnnnnnnnnnnnnnnnnnnnnnnnnnnnnnnnnnnnnnnnnnnnnnnnnnnnnnnnnnnnnnnnnnnnnnnnnnnnnnnnnnnnnnnnnnnnnnnnnnnnnnnnnnnnnnnnnnnnnnnnnnnnnnnnnnnnnnnnnnnnnnnnnnnnnnnnnnnnnnnnnnnnnnnnnnnnnnnnnnnnnnnnnnnnnnnnnnnnnnnnnnnnnnnnnnnnnnnnnnnnnnnnnnnnnnnnnnnnnnnnnnnnnnnnnnnnnnnnnnnnnnnnnnnnnnnnnnnnnnnnnnnnnnnnnnnnnnnnnnnnnnnnnnnnnnnnnnnnnnnnnnnnnnnnnnnnnnnnnnnnnnnnnnnnnnnnnnnnnnnnnnnnnnnnnnnnnnnnnnnnnnnnnnnnnnnnnnnnnnnnnnnnnnnnnnnnnnnnnnnnnnnnnnnnnnnnnnnnnnnnnnnnnnnnnnnnnnnnnnnnnnnnnnnnnnnnnnnnnnnnnnnnnnnnnnnnnnnnnnnnnnnnnnnnnnnnnnnnnnnnnnnnnnnnnnnnnnnnnnnnnnnnnnnnnnnnnnnnnnnnnnnnnnnnnnnnnnnnnnnnnnnnnnnnnnnnnnnnnnnnnnnnnnnnnnnnnnnnnnnnnnnnnnnnnnnnnnnnnnnnnnnnnnnnnnnnnnnnnnnnnnnnnnnnnnnnnnnnnnnnnnnnnnnnnnnnnnnnnnnnnnnnnnnnnnnnnnnnnnnnnnnnnnnnnnnnnnnnnnnnnnnnnnnnnnnnnnnnnnnnnnnnnnnnnnnnnnnnnnnnnnnnnnnnnnnnnnnnnnnnnnnnnnnnnnnnnnnnnnnnnnnnnnnnnnnnnnnnnnnnnnnnnnnnnnnnnnnnnnnnnnnnnnnnnnnnnnnnnnnnnnnnnnnnnnnnnnnnnnnnnnnnnnnnnnnnnnnnnnnnnnnnnnnnnnnnnnnnnnnnnnnnnnnnnnnnnnnnnnnnnnnnnnnnnnnnnnnnnnnnnnnnnnnnnnnnnnnnnnnnnnnnnnnnnnnnnnnnnnnnnnnnnnnnnnnnnnnnnnnnnnnnnnnnnnnnnnnnnnnnnnnnnnnnnnnnnnnnnnnnnnnnnnnnnnnnnnnnnnnnnnnnnnnnnnnnnnnnnnnnnnnnnnnnnnnnnnnnnnnnnnnnnnnnnnnnnnnnnnnnnnnnnnnnnnnnnnnnnnnnnnnnnnnnnnnnnnnnnnnnnnnnnnnnnnnnnnnnnnnnnnnnnnnnnnnnnnnnnnnnnnnnnnnnnnnnnnnnnnnnnnnnnnnnnnnnnnnnnnnnnnnnnnnnnnnnnnnnnnnnnnnnnnnnnnnnnnnnnnnnnnnnnnnnnnnnnnnnnnnnnnnnnnnnnnnnnnnnnnnnnnnnnnnnnnnnnnnnnnnnnnnnnnnnnnnnnnnnnnnnnnnnnnnnnnnnnnnnnnnnnnnnnnnnnnnnnnnnnnnnnnnnnnnnnnnnnnnnnnnnnnnnnnnnnnnnnnnnnnnnnnnnnnnnnnnnnnnnnnnnnnnnnnnnnnnnnnnnnnnnnnnnnnnnnnnnnnnnnnnnnnnnnnnnnnnnnnnnnnnnnnnnnnnnnnnnnnnnnnnnnnnnnnnnnnnnnnnnnnnnnnnnnnnnnnnnnnnnnnnnnnnnnnnnnnnnnnnnnnnnnnnnnnnnnnnnnnnnnnnnnnnnnnnnnnnnnnnnnnnnnnnnnnnnnnnnnnnnnnnnnnnnnnnnnnnnnnnnnnnnnnnnnnnnnnnnnnnnnnnnnnnnnnnnnnnnnnnnnnnnnnnnnnnnnnnnnnnnnnnnnnnnnnnnnnnnnnnnnnnnnnnnnnnnnnnnnnnnnnnnnnnnnnnnnnnnnnnnnnnnnnnnnnnnnnnnnnnnnnnnnnnnnnnnnnnnnnnnnnnnnnnnnnnnnnnnnnnnnnnnnnnnnnnnnnnnnnnnnnnnnnnnnnnnnnnnnnnnnnnnnnnnnnnnnnnnnnnnnnnnnnnnnnnnnnnnnnnnnnnnnnnnnnnnnnnnnnnnnnnnnnnnnnnnnnnnnnnnnnnnnnnnnnnnnnnnnnnnnnnnnnnnnnnnnnnnnnnnnnnnnnnnnnnnnnnnnnnnnnnnnnnnnnnnnnnnnnnnnnnnnnnnnnnnnnnnnnnnnnnnnnnnnnnnnnnnnnnnnnnnnnnnnnnnnnnnnnnnnnnnnnnnnnnnnnnnnnnnnnnnnnnnnnnnnnnnnnnnnnnnnnnnnnnnnnnnnnnnnnnnnnnnnnnnnnnnnnnnnnnnnnnnnnnnnnnnnnnnnnnnnnnnnnnnnnnnnnnnnnnnnnnnnnnnnnnnnnnnnnnnnnnnnnnnnnnnnnnnnnnnnnnnnnnnnnnnnnnnnnnnnnnnnnnnnnnnnnnnnnnnnnnnnnnnnnnnnnnnnnnnnnnnnnnnnnnnnnnnnnnnnnnnnnnnnnnnnnnnnnnnnnnnnnnnnnnnnnnnnnnnnnnnnnnnnnnnnnnnnnnnnnnnnnnnnnnnnnnnnnnnnnnnnnnnnnnnnnnnnnnnnnnnnnnnnnnnnnnnnnnnnnnnnnnnnnnnnnnnnnnnnnnnnnnnnnnnnnnnnnnnnnnnnnnnnnnnnnnnnnnnnnnnnnnnnnnnnnnnnnnnnnnnnnnnnnnnnnnnnnnnnnnnnnnnnnnnnnnnnnnnnnnnnnnnnnnnnnnnnnnnnnnnnnnnnnnnnnnnnnnnnnnnnnnnnnnnnnnnnnnnnnnnnnnnnnnnnnnnnnnnnnnnnnnnnnnnnnnnnnnnnnnnnnnnnnnnnnnnnnnnnnnnnnnnnnnnnnnnnnnnnnnnnnnnnnnnnnnnnnnnnnnnnnnnnnnnnnnnnnnnnnnnnnnnnnnnnnnnnnnnnnnnnnnnnnnnnnnnnnnnnnnnnnnnnnnnnnnnnnnnnnnnnnnnnnnnnnnnnnnnnnnnnnnnnnnnnnnnnnnnnnnnnnnnnnnnnnnnnnnnnnnnnnnnnnnnnnnnnnnnnnnnnnnnnnnnnnnnnnnnnnnnnnnnnnnnnnnnnnnnnnnnnnnnnnnnnnnnnnnnnnnnnnnnnnnnnnnnnnnnnnnnnnnnnnnnnnnnnnnnnnnnnnnnnnnnnnnnnnnnnnnnnnnnnnnnnnnnnnnnnnnnnnnnnnnnnnnnnnnnnnnnnnnnnnnnnnnnnnnnnnnnnnnnnnnnnnnnnnnnnnnnnnnnnnnnnnnnnnnnnnnnnnnnnnnnnnnnnnnnnnnnnnnnnnnnnnnnnnnnnnnnnnnnnnnnnnnnnnnnnnnnnnnnnnnnnnnnnnnnnnnnnnnnnnnnnnnnnnnnnnnnnnnnnnnnnnnnnnnnnnnnnnnnnnnnnnnnnnnnnnnnnnnnnnnnnnnnnnnnnnnnnnnnnnnnnnnnnnnnnnnnnnnnnnnnnnnnnnnnnnnnnnnnnnnnnnnnnnnnnnnnnnnnnnnnnnnnnnnnnnnnnnnnnnnnnnnnnnnnnnnnnnnnnnnnnnnnnnnnnnnnnnnnnnnnnnnnnnnnnnnnnnnnnnnnnnnnnnnnnnnnnnnnnnnnnnnnnnnnnnnnnnnnnnnnnnnnnnnnnnnnnnnnnnnnnnnnnnnnnnnnnnnnnnnnnnnnnnnnnnnnnnnnnnnnnnnnnnnnnnnnnnnnnnnnnnnnnnnnnnnnnnnnnnnnnnnnnnnnnnnnnnnnnnnnnnnnnnnnnnnnnnnnnnnnnnnnnnnnnnnnnnnnnnnnnnnnnnnnnnnnnnnnnnnnnnnnnnnnnnnnnnnnnnnnnnnnnnnnnnnnnnnnnnnnnnnnnnnnnnnnnnnnnnnnnnnnnnnnnnnnnnnnnnnnnnnnnnnnnnnnnnnnnnnnnnnnnnnnnnnnnnnnnnnnnnnnnnnnnnnnnnnnnnnnnnnnnnnnnnnnnnnnnnnnnnnnnnnnnnnnnnnnnnnnnnnnnnnnnnnnnnnnnnnnnnnnnnnnnnnnnnnnnnnnnnnnnnnnnnnnnnnnnnnnnnnnnnnnnnnnnnnnnnnnnnnnnnnnnnnnnnnnnnnnnnnnnnnnnnnnnnnnnnnnnnnnnnnnnnnnnnnnnnnnnnnnnnnnnnnnnnnnnnnnnnnnnnnnnnnnnnnnnnnnnnnnnnnnnnnnnnnnnnnnnnnnnnnnnnnnnnnnnnnnnnnnnnnnnnnnnnnnnnnnnnnnnnnnnnnnnnnnnnnnnnnnnnnnnnnnnnnnnnnnnnnnnnnnnnnnnnnnnnnnnnnnnnnnnnnnnnnnnnnnnnnnnnnnnnnnnnnnnnnnnnnnnnnnnnnnnnnnnnnnnnnnnnnnnnnnnnnnnnnnnnnnnnnnnnnnnnnnnnnnnnnnnnnnnnnnnnnnnnnnnnnnnnnnnnnnnnnnnnnnnnnnnnnnnnnnnnnnnnnnnnnnnnnnnnnnnnnnnnnnnnnnnnnnnnnnnnnnnnnnnnnnnnnnnnnnnnnnnnnnnnnnnnnnnnnnnnnnnnnnnnnnnnnnnnnnnnnnnnnnnnnnnnnnnnnnnnnnnnnnnnnnnnnnnnnnnnnnnnnnnnnnnnnnnnnnnnnnnnnnnnnnnnnnnnnnnnnnnnnnnnnnnnnnnnnnnnnnnnnnnnnnnnnnnnnnnnnnnnnnnnnnnnnnnnnnnnnnnnnnnnnnnnnnnnnnnnnnnnnnnnnnnnnnnnnnnnnnnnnnnnnnnnnnnnnnnnnnnnnnnnnnnnnnnnnnnnnnnnnnnnnnnnnnnnnnnnnnnnnnnnnnnnnnnnnnnnnnnnnnnnnnnnnnnnnnnnnnnnnnnnnnnnnnnnnnnnnnnnnnnnnnnnnnnnnnnnnnnnnnnnnnnnnnnnnnnnnnnnnnnnnnnnnnnnnnnnnnnnnnnnnnnnnnnnnnnnnnnnnnnnnnnnnnnnnnnnnnnnnnnnnnnnnnnnnnnnnnnnnnnnnnnnnnnnnnnnnnnnnnnnnnnnnnnnnnnnnnnnnnnnnnnnnnnnnnnnnnnnnnnnnnnnnnnnnnnnnnnnnnnnnnnnnnnnnnnnnnnnnnnnnnnnnnnnnnnnnnnnnnnnnnnnnnnnnnnnnnnnnnnnnnnnnnnnnnnnnnnnnnnnnnnnnnnnnnnnnnnnnnnnnnnnnnnnnnnnnnnnnnnnnnnnnnnnnnnnnnnnnnnnnnnnnnnnnnnnnnnnnnnnnnnnnnnnnnnnnnnnnnnnnnnnnnnnnnnnnnnnnnnnnnnnnnnnnnnnnnnnnnnnnnnnnnnnnnnnnnnnnnnnnnnnnnnnnnnnnnnnnnnnnnnnnnnnnnnnnnnnnnnnnnnnnnnnnnnnnnnnnnnnnnnnnnnnnnnnnnnnnnnnnnnnnnnnnnnnnnnnnnnnnnnnnnnnnnnnnnnnnnnnnnnnnnnnnnnnnnnnnnnnnnnnnnnnnnnnnnnnnnnnnnnnnnnnnnnnnnnnnnnnnnnnnnnnnnnnnnnnnnnnnnnnnnnnnnnnnnnnnnnnnnnnnnnnnnnnnnnnnnnnnnnnnnnnnnnnnnnnnnnnnnnnnnnnnnnnnnnnnnnnnnnnnnnnnnnnnnnnnnnnnnnnnnnnnnnnnnnnnnnnnnnnnnnnnnnnnnnnnnnnnnnnnnnnnnnnnnnnnnnnnnnnnnnnnnnnnnnnnnnnnnnnnnnnnnnnnnnnnnnnnnnnnnnnnnnnnnnnnnnnnnnnnnnnnnnnnnnnnnnnnnnnnnnnnnnnnnnnnnnnnnnnnnnnnnnnnnnnnnnnnnnnnnnnnnnnnnnnnnnnnnnnnnnnnnnnnnnnnnnnnnnnnnnnnnnnnnnnnnnnnnnnnnnnnnnnnnnnnnnnnnnnnnnnnnnnnnnnnnnnnnnnnnnnnnnnnnnnnnnnnnnnnnnnnnnnnnnnnnnnnnnnnnnnnnnnnnnnnnnnnnnnnnnnnnnnnnnnnnnnnnnnnnnnnnnnnnnnnnnnnnnnnnnnnnnnnnnnnnnnnnnnnnnnnnnnnnnnnnnnnnnnnnnnnnnnnnnnnnnnnnnnnnnnnnnnnnnnnnnnnnnnnnnnnnnnnnnnnnnnnnnnnnnnnnnnnnnnnnnnnnnnnnnnnnnnnnnnnnnnnnnnnnnnnnnnnnnnnnnnnnnnnnnnnnnnnnnnnnnnnnnnnnnnnnnnnnnnnnnnnnnnnnnnnnnnnnnnnnnnnnnnnnnnnnnnnnnnnnnnnnnnnnnnnnnnnnnnnnnnnnnnnnnnnnnnnnnnnnnnnnnnnnnnnnnnnnnnnnnnnnnnnnnnnnnnnnnnnnnnnnnnnnnnnnnnnnnnnnnnnnnnnnnnnnnnnnnnnnnnnnnnnnnnnnnnnnnnnnnnnnnnnnnnnnnnnnnnnnnnnnnnnnnnnnnnnnnnnnnnnnnnnnnnnnnnnnnnnnnnnnnnnnnnnnnnnnnnnnnnnnnnnnnnnnnnnnnnnnnnnnnnnnnnnnnnnnnnnnnnnnnnnnnnnnnnnnnnnnnnnnnnnnnnnnnnnnnnnnnnnnnnnnnnnnnnnnnnnnnnnnnnnnnnnnnnnnnnnnnnnnnnnnnnnnnnnnnnnnnnnnnnnnnnnnnnnnnnnnnnnnnnnnnnnnnnnnnnnnnnnnnnnnnnnnnnnnnnnnnnnnnnnnnnnnnnnnnnnnnnnnnnnnnnnnnnnnnnnnnnnnnnnnnnnnnnnnnnnnnnnnnnnnnnnnnnnnnnnnnnnnnnnnnnnnnnnnnnnnnnnnnnnnnnnnnnnnnnnnnnnnnnnnnnnnnnnnnnnnnnnnnnnnnnnnnnnnnnnnnnnnnnnnnnnnnnnnnnnnnnnnnnnnnnnnnnnnnnnnnnnnnnnnnnnnnnnnnnnnnnnnnnnnnnnnnnnnnnnnnnnnnnnnnnnnnnnnnnnnnnnnnnnnnnnnnnnnnnnnnnnnnnnnnnnnnnnnnnnnnnnnnnnnnnnnnnnnnnnnnnnnnnnnnnnnnnnnnnnnnnnnnnnnnnnnnnnnnnnnnnnnnnnnnnnnnnnnnnnnnnnnnnnnnnnnnnnnnnnnnnnnnnnnnnnnnnnnnnnnnnnnnnnnnnnnnnnnnnnnnnnnnnnnnnnnnnnnnnnnnnnnnnnnnnnnnnnnnnnnnnnnnnnnnnnnnnnnnnnnnnnnnnnnnnnnnnnnnnnnnnnnnnnnnnnnnnnnnnnnnnnnnnnnnnnnnnnnnnnnnnnnnnnnnnnnnnnnnnnnnnnnnnnnnnnnnnnnnnnnnnnnnnnnnnnnnnnnnnnnnnnnnnnnnnnnnnnnnnnnnnnnnnnnnnnnnnnnnnnnnnnnnnnnnnnnnnnnnnnnnnnnnnnnnnnnnnnnnnnnnnnnnnnnnnnnnnnnnnnnnnnnnnnnnnnnnnnnnnnnnnnnnnnnnnnnnnnnnnnnnnnnnnnnnnnnnnnnnnnnnnnnnnnnnnnnnnnnnnnnnnnnnnnnnnnnnnnnnnnnnnnnnnnnnnnnnnnnnnnnnnnnnnnnnnnnnnnnnnnnnnnnnnnnnnnnnnnnnnnnnnnnnnnnnnnnnnnnnnnnnnnnnnnnnnnnnnnnnnnnnnnnnnnnnnnnnnnnnnnnnnnnnnnnnnnnnnnnnnnnnnnnnnnnnnnnnnnnnnnnnnnnnnnnnnnnnnnnnnnnnnnnnnnnnnnnnnnnnnnnnnnnnnnnnnnnnnnnnnnnnnnnnnnnnnnnnnnnnnnnnnnnnnnnnnnnnnnnnnnnnnnnnnnnnnnnnnnnnnnnnnnnnnnnnnnnnnnnnnnnnnnnnnnnnnnnnnnnnnnnnnnnnnnnnnnnnnnnnnnnnnnnnnnnnnnnnnnnnnnnnnnnnnnnnnnnnnnnnnnnnnnnnnnnnnnnnnnnnnnnnnnnnnnnnnnnnnnnnnnnnnnnnnnnnnnnnnnnnnnnnnnnnnnnnnnnnnnnnnnnnnnnnnnnnnnnnnnnnnnnngatcacctgaggtcaggagtttgagaccagcctggccatcacggagaaacctggtctctactaaaaataaaaaaattagtcgggcatggtggtgggtgcctgaaatcccagctattcgggaagctcaggcaggagaatcgcttgaacccaggaggcggagattatagtgagccgagaccacgccacttcactgcagtctgggcgacagagcaaggctctgtcccaaaataaataaataaataaataaataaggaattcttttattccagcatctttcaaaagaaacattttaggctgggcgcagtggctcacacctgtaatcccagcactttgggaggccgaggccagtagatcacaaggtcaggagttccagaccagcctggccagtatggtgaaaccccgtctctactaaaaatataaaaaattagccgggcatggtggtgcatgcctgtagtcccggctacccgggaggctgaggcaggagaattccacgaacccgtgagaccgaagttgtggtgagccaagttcacaccactgcactccagcctgggcgacagagcgagactccgtctcaaaaaaaaaaaaaaaaagaaagaaaagagacattttaatgacagctttagttgcttagacatttttagaaaatggcctgtagaaaaatcagttatattttaaaatattttactttatattcactgagttttctttcatattatcttaacacagcaatccatgtcagaaataagttgtgaaacccttaacagtttacattgtcttgtgtgttagtgtagacctgggtcatagagaccgtggagctagaggagagcagccagcgaaggtggagaaatactcatctgaactgtgccagggaatcccaggaaggagcgcttcccgcagcagaagccgtgagagtgtgggttgctgtgggagggtagatggcaggaggacatggggctgggcagccgggagggactgatggcctgggagacagcagtgaagaggagaggggagagcagaggcaggcgccatgggttctgggcatggccgtgagccactggaagatgatacgggagcttatctttgttcccttggggaagaagcccttattttgagacctcgaaggcataaatcctaaggcaaaatatgggtgatttggccagatcaaaattcagtttttctgtgcattggaggacacagaggaccattaacaggtagtgactgagaggagcactttcctcgttccttctttttaatggataaagccggcaaggagccagtgttagggggattcctgcaactcagcaggtaaccaactagaagtctctagaaccatgacagcggatattaatagttcattgaaaggagaccagatgaccaagcagcacgtgaagactgcacggcctcgccacgcccagggagtgtgagctggagcccgggggcgtgccgccccgtctgccggccgcaatgaggaagctgggattggggatctgcagaaacgggaacttgcgtggtgctggcgggaatatcacggggccagccattctggaatgaacctgacaggacagtcatgtgtcacttaacaatgggctgtgctctgagaaatgcctctgtaggggactccatcccgtaggaacatcacagcgcactcacacagctcactgtacacccagcctgtgcggcttagcccattgctcccagccatgggcctgtgcggcacgtgaccctgctgactaccctgggcaatcgtaacataatgtaaggatttgtgtgtctaaacagctaaattggccgggtactgtggctcacgcgtgtaatcccagcactctgggatgctggggcaggcagatcacttacgctgaggagctcaagagcggcctgggcaatagagtaagacttcatctctacaaaaaaatgtaaaaattagccaagcatggtggctcatgcctgtagccccagctactcagaggctgaggtgggaagatgtcttggactcaggagggaaaggtttcagtgagctgtgattacaccactgcatgccagcctgggcgacagagccagaccccctctgaaaaaaaaatgctaaacaaaggtacagtaaaaatacagtctaaagtgttaaaaatagcaccgggcacttaccaggagctgctcggatgcctcagggagtgagggcgagtgagcatggaagcctaggatgttaccgtatgtacttacgtgcactggcagcaccacaaacacgggagatacactgtgctacatgttatgaggacagggacttctcagctcctgttgtaacctcacgggacctccttggtctgctcagtccgttgttggctgaaacatcgtgggtagcacagacctgtgcagagacgctcactgcagcctcgcctgtggcggcaggggttacagaagaagcgtggacacctgcatggaggggaacacactcactgcagcctcgcctgtggcggcaggggttacagaagcggcgtggacacccctgtggagggcaacggggtgagctgctggtcgtgtcgtgggggtgtggctatgtgacagttggcacaggacatgcttgggtctacttctgtcaatagctttatttcgtggcagtggattgcctgttgtttctctcatagtttattgaatgccggggtttttttgtagaacagtggagaccaagataaatagtcctcatgcccagaaacaggcactccccttcagacaggccctgggtgggtgtggtcaccaggtgagcgggctgtgggcttggggctgccttcatccctgcaggcaccacaggcttccgattcttccagcagtggccatagccagcctgtgcatggtgtgggtgccagagtggccccgccccttcttagatgccagcaggccttggatgctgtgctgtgcctggtgtctgctcctgccctccctggcagagggctactgctgcttgcttccggctccttggcgtgctcctggcccagcctccgtcgcaggtgggtcctatacccttggggtgcagggctcgtgcccactcctgctcctgctgccaaactctgccttatacctggacagtggcttgggcgggagagtgtgtgagccagggcaggccttgagttgaaaatgtttcctgcctctccccggtggctctgtacctggtagaaggagggaagaggctgcaggttccccatcccctgttttctcctttcctgccctctggcagctgccaaactcagggtgggcggggaggcctttgccctgcgctccagagtgcacacagagctctgtgcatggtgtgagagttcaacagaaacgggaatgaggaagggggaacagtcgggtttggaaatggtttttactcagagttgaaggcactgccttttaccttgagcaacgtaaagctgttctgattcctgattctctgtatggaaggattctctcgggcagtgtccagggtcttatggcaggaatgacatctccagtcccctgtccccctctggaattttgcctatccaggggatccccctctcttgaccctggggaggtttatgtggcctgctggggcggtaattgccatgtgactgacgggttgagggggctcaggcttggcccgggtgccatgttggaaggaagcccaggccgcggggataggccatgcaggtgtgctgtctgccagccgcgttgaccaccagctacacacaagtgagcctacaggtgcctcgagccaccccaactgatgagcagagcagagcagagcccagccgcccctgtgagccccgctccagatacagatgtgtgagcaaaataaatgttgccactgtctgaagccatttttctgggggttgtcgttaaacaggcttagtgcctgaggcgggactctgtggccggttctctgtcatgtcacattggaccttggcatgggccatgcccgtcgtgtgctgggcatgtgctggaccatgtcagccctgcaccagccttcctggggcctgccatggacccacgctgcccgccggcgatgccgtctctggatccagtcactgagcggggggtgttagacccataaagaagcaaagtttagggggagcttggaagggagtgggctgccccgggcctcttcacgcgacgccaacgccaccttggtgtgagccaacagagagggctgtgccccaggtgtggggttgcgggcaggagctgcccactcaggctctctgaggcgtctttgagtcgttctctctcagttcagacttccctctgacagcttcccaaagctttgatggagctgtcctgagtcacctgcacaaccttgctagctgcagcctaaggagacactgagcgagcacacggttcacatttctaaaatgatgctttaatcaaatatgttaagctaactcttttttttttttttttttaaacagagtcttgctctgtccccaggctgaagtacagtggcacaatctcggctcactgcaacctccgcctcctgggttcaagcagttctcctgcctcagcctcccaagtatctgggattacaggcgtgtgccaccacacccagctaagttttatatttttagtagagacggggggtttcaccatattggccaggctggtcttgaacccctgacctcaggtgatccgcctgcctaggcctcccaaagtgctgggattacaggtgtgagccaccgaagagaacactttttaaatgttatttcggtgccagtacttgcttcaattaagcgctcattagttaaaaagaatgctagcctccatctgagccccaccaagccctcactgtccttcctggcgggagaagccagcggatatgcccttgagctgagggctgtcgaggatgtggtggtccagggcatccctggactcactgtctgacaggcagggacagcccctgcagaggaagaggctgaacactggacaggggtgcctgccactccacagggcctgtccagtgcctatcctggtgggtgagtagcaggctcgctgcctactccgggcccaccaccaccaccagggctgtgctgcaggttgcaaaaggcccagcggcgcccgagccactccttatctggtgaggaagatgcccagacacagggcagctctcagcacgggaaaggaaaagcctgacctttgggccacatcacagacaactggttgatttaataagactgaatcgtggccgggcatagtggcttaagcctgtaatcccaacactttgggaggccaaggcaggtggatcacttgacctcaggagtttaagaccagcctggccaacatggcaaaactccatctataccaaaaatacaaaaattagctggcatggtggtgcatgcctgtagtcccagatacttgggaggctgagatggtaggatcactcgagcccaggaggtggaggttgcagtgacccaaggtcgtgccactgcactccagcctgggcaacagcaccagaccttatctcgcaaaaacccacaaaaatcctgaattgtaaagccactaatagactagctctgcactgaagtactcaaagaaaggattagaaacccagtgttcctcagatgcagtctttaggacttaaataacttaaatggtggcctgtaatgagctgcacctgtgtccctgtgagggtgcctgccaagcctttgaagccatgtgttgtcttaggcgggttgcatgtcttcttgcactgctgtttttgctagacatttgctcacaatccttttttacatttttaaacaaatagcacaaatatgaacttgggctcggaccaagacagtagttctgagcttagtgaaattcacagcactagggtgaagtcactgggcacggcagtctcttgctgacagcctgtccttttatttgacatcatccttcgcctggctcctgctgtcactctcttgcgtgtaggtttttgtaagcattggcactttcaatgatcccttctggaaaccagccccccgcctgagctttcaggaatgtatctgtttccaccacctttcagcgattcttcctgctccctctgccaaggtctgtttctccaggatcggagggggtcgtgtgaatcagcccagatgctttcagcagcgaacaagaggccccagcacccggcttccgccccggggcgttggttctctggcgtctctgtggccatgggatgccaccatagcagccagggccacaccaggggatgctgttgctcccagccctctctgcagagccccgggacccaccctgtgtggactgctgaggtcacatgcccacccagactagtgactggccagggaatggcatgtacacattggcttctgtcaactgaggtcaatccctagtccctgctcctgccctcccatcatcgtggctgtgggaagaggcaaggagacctgaactgtcgggaatgaagaaggggatggatgctgagtagatcgacatccgtgaccctgggtttcctccttcccccacctcgagagctttggcaagattagacaagtatgtaaggagaaggagcgggcctggctcccctgaagctgagcagtcagggcctgaatgatttgaatgggatccaagtaaaccccatggccccacatggcagagtctctgcatggaatccagcctggactcacgaccctgctgcctcacaggcctggcacagcagtgcctgctagttccttgcctctggtgggtaggggactgattggtcctgctgatggcagcagcgggctgtctttggagcaaagttggagctacgttcaggtgctgtcatagcctgactgggtgtgcacacgcttggggcaatgctgacacgccagccccttgccacctcggccccctctggactttgggcactgataagcattaggaggaaagccaagtgggggctgacggcagcttgctgctggcctgcaggcacccttgacacctacagcccgggcaccatgaatggcagcaggaggcagacaggttcctgggtggaagggggcaggttcttggtgaggccccaccttcaggccaagaagggcttgaaggctgggggccaggctgccagtcctgtggactggagtgggaacttatggtgcctttttcgggcctgcccatggccacccttggaccagttggcacagcatgcacttcctcccctttgaggcccataaaagccccaggctcagccagagctgggcaaatgttgggatgaccacctgcagacaggagcaacccactctagggccccctctttgctgaaagctgcagagatgatggaaagatgacagggagatgatgggacaaccagctgcagagaggagctaccctctctactgatagctgaacacttgttgggacgacttgcctaaccctttctgctaggagctgaacagacgttgggacaccctggctgcagaaaggagctgcccccctgtgggtttcctcagagctgttctgtcactcaataaagctcctcttcatctggctcactctccacttgtctgcttacctcattcttcttggacaagaactcaggacctgccaaatggcgaggctaaaagagctgtagcataaacagggctgagatgtaccctttgcttgccacattacaggtgaagtgaaggagagaagagctgcagccctttggggaacccagacctgggagctccccaagccagggctgtgattccttctttggggccctgtggttcctggtgtctctaaacttttgggtgccaccgtgttccccagtgccagctgtggaagctgcttgcagtgtgcttggtctggccgaagcctcacagggagccggcacctatagctgcttgccctgctgaagcagctggcatgtctgactgtgtgcagtggccagaccccacgcacgctcaaacacgccctgccattccacgcctgactcgcccttggtaggcatgggacccaggcctgtagtgtgagcccagtgcagcctgccaggccaagtgggtgagatgagcccagcaggcctgagcaaagatgccccagccacagaggttttggccagaaaaacgacagcccgaagatctcgtaacacaacggcattttctctcccagtttgcagtgcttccccatctcttggtgctgtggtgtctgcttgcagctcagcgtctgttcgagcccatctgttcacacgctcctgtcatcctcctgtgtctgtgaagtcttaaacctttagttaagtcaatacgtgttcggtgagatgcgattctctattttattcactaaatcaagactagctgacatgtctttgttgttattccacgttacataaattctacgttatttctaaacttaaaaaataatgtagctgggcacggtggctcacgcctgtaatcacgcctgtaatcccactttgggaggctgaggcaggcggtcacaaggtctggagttcgagaccagcctggccagcatggtgaaacccccatcttttttaaaaatacaaaaattagccaggcatggtggtgcatgcctgtagtcccagcgactcgggaggctgaggcaggagaatcgcttgaacccgggaggtggaggttgcagtgagctgagatcgtgcctccagcctgggtgacaaagcaagactccatctcaaaataataataataatgttaaataaataaaaataaaaaaataatgtagggaacctttaaaaatcctgaggagatagcccacagaccactcctggcccatcttgaccattgatgctggcctcatgagggccaggtgtgtgctcctgggcgtgggcccagggagcctgcaattttgaccctaatggggaccgatctgcacagctgagccagcctctctgcagtccccatcccatccatggcaagccccccatactttcttctcatggtcaagggtttggtgacgcagctatgagcaactcctgctggcctgtaaagctcctctgtcctccaatgttgtggcctctgctgtgagaacatccgtcaggagacagtgaagacctccacagctgggggctcagtgggtccagagcattagcgccccgacccaggggctgacccaggccctacgtcacgggcatgtgtccccggctaggaagtcctgagccagccagggtgctcctgcaggagacagaaccagctgaaccacagcttggcctccggggaggactcacaggccacgaggtggcggtgcttgtggctgctgtgagtgcctgccccggagaggggctgtgtctgtgcgctcaccagcggctccagagcctgccgggcagcaaacagacattatggtgccccgatgggtgagcagccccatgcacaggtgtgtacctgctgactgtgcggaattgtgactctcaggacacttccgtaacaatgaccattttgactgcattgagaatgactagccttggccacttcccctgcattttgcatggagcccagggcccagctcactccgattgtgacggagcgtgagacccttgcagacagccaggggaggtggcagcctgagactgctgcagcagggacagttggcatttagcgtcactcttgaagatcgtttttgagaatttgggtgtttggggtttttagtgtggcctcaaatagattgagttgtcaatgctacagctccggagcctcagctgtttgtgccaccccacactggggtggatggggctgtgccctgccctccctgaggctcactcactgtgcccctctcctggcttctctcctgcctccctgatcagcaagttcctaggggctccccgaatatcatcactccctggagccgcagagacccccacagctccctgcttggggctcctctgcatcccgcacaaactcccccttcagttcctgacgcatacccctgccctctgcaggtgctatgtaggggccccgccagcctccgaggcccacaagggcttctggttcaggaaggctctgtggttacctcaactccaaaccctctccacccccacccccaggcagcatgctggcaccctagccccgggcaccctgagaacaccaagtgccgtttcctggaagaggaaatgtttctgccaagaagtttccacgcctctggcctatgattgactgacttgcttttgaaacccgttcaggagaggtcatgcctatccccttcctctacccgctggcctgccctggctcacttggctgcatagtgggaaacaggaacttttccactggccctaagcaaagcctactctccagagactggcagaaaaccaagtgcctgaggagagttgggtgcggggaaagccggaggctcccgtggggccctgtagcgggagtgccttcccagtcgctctgggaagccctgccctctcctcctcccacctgcctccctgccagtgtcctcccccagcagacctgcaggaacaacaccgtcatgggggcccgagagttggggacctcccaggccagcactacagcccagcacagatgccaccaacctgcggagaaaagcctttgttcgtgtccacagcggctctgtctccatcctttaggtagcttgatgccagggcataattcaagccattgctgagatgcccagagaccaagaacatgaagctggccaggcttggtcattaggaaagccctgggcaccaagacctgccccctcacagctgctacagctggctggctggctggctggatccttcagggtggggctgcagtcatcgtttcatgagccacagccaagaggtgtcataagcagctgcagaggtttgtggaggacatatgaacagccacccatctggagtcgggtctgctgtggacaggtgtgcaggttgtgaacggcacaactccatgcctccatgccctcagagtctacgcctggatgggcacgtgcagcaccccgtgtggacttctcagctcccctctgttttcagtgttcctggctgggcaggacgagcagatcctgtacaaagagcagccctcacccccatctgcagtctgatctgctcccctccgtcctcagcaggcccctgcacccccatcctcaccctccacacctccccagccctcccacctgcacctggactgcaccagccacactcctgactcaggcctttgcccacctgtgccttcagccaggcatgcttttccccagggcccgctgggcagccctgagcctctgcccagcctccgctcagataccacgtcttcagtgagggctgcccccacctacgcactgtggtaaaatgtaccatcttaaccatttttttttttttgagacggagtctcactctgtcgcccaggctggagtgcagtggcgggatctcggctcactgcaagctctgcctcctgggttcacgccattctcctgcctcagcctctggagtagctgggactacaagcgcccgccaccacgcccagctaatttttttctatttttagtagagatggggtttcatcgtgttagccagcatggtctcgatctcctgaccttgtgatccgcccacctcggcctcccaaagtgctgggattccaggcgtgagcagccgcgcccggccccatgttaaccatttgtaaatgcatagttgagtagggttaagtacgttcatgttgtgtaaccatcaccaccatccatctccagaactttctcactttcccgaactgaaactgttctcagccaacaatgattcctcatccccctcctcagcccctggcaaccactgttctcgttgcctctctgagttcagctgttctagattctttacataagtggggtcacgcaggattcgtggggtcatgcagggtttgtgctgttgtagcacgtggcgtggtttcattcctttttaagctgaatcattgtccgttgcccggatagtccacattttgcttctccattcgtctgcatgaggtagatcttatctccatgtctagatcttatctccattttgtagacatggaaattgggacatattgcccaagaacccccaactgataagtggcagagtttggattcaaacccagatcaaactgggtccagggttgtggcttttttccaggctcgtccagcaagtgccaaggctgggaggtgctcgtcaacaggcactccatgttggccaggctggtctcgaactcctgactcaggtgatccacctgcctcggcctcccaaagtgctaggattacaggcgtgagccatcacatccggcctaacaggcactctgtgcacggtgtgtgtgtgttgggggtggggagtgctatgggctagattgtgtcccctcaaaactgacatgttgcagacctaacccccactacctcagaatataaccttatttggagacagggtctttaaagaggtgattaaagctaaatgaggccattagaccctaacccagtgactggtgtccttacacaaagggtaatgtggatgcagatgcggagggagaatgccctgctaggatgaaagtggagaacaagggggtgcttctccaagctaaggaccaccaagcagggccagcaacccgcagaagccggagaggcctgggacggaggttccctcagccccagaaggagctgtggcattaaagagttcaaactcgctgggtgcagtggctcacgcctgtaatcccagcactttgggaggccaaggcaggaggatcacttgagcccaggagttagagaccagcctaggcaacatgtaaaaccctgtctctacaaaaattagctggtgtggtggtgtacacctgtggtcccagtgattcaagaaactgaggcaggaggatcacttgagcccagatcaaggccccagtgagccatgtccacaccactgcaaagtgcgagaccctgtctcgtaaaaaagaaacactataagctatgcactaccttgtacggaaaacgttgcaaccctgtcagacttctcttgtctctgcctctatgtaagcgagaccttcccttcccactctggagcgctggcccattcttttcgagtctgtttcccgagtgatggttcccaagctttaagcttgaataaaccctggacttcactgtattttatgaatctcattattcagggttgatggaaccatccctgccaacaccttgaccctggacttctggcctccaagtctgtgagacagtaagttgtcgaagcacccactgtggggccctttgctacagcagccctggcggactcacgctgggccacacggggaaaaccgaaggggaagctcgagggcatttagggcccacctggatgatccaggagtgtctctgcatctcaggagcctcagcttcacacctgctggactctttttccaaagagggcccattcacaggtttcagagattagggcctggtagctttgaaggaccactgttcagctcaccagagctctactgtttttagaggggaggggcggacagggtctccgtctgccagtcaggctggagtggcgctcacctataaacttacttgcatccatatgtccagaaacttgcttgtgctcctttcctgtctccctccttttcttccttccttccttttttttttttttttttttttttttgagacagggtctggctctgtcacctaggctggagcacggtgatgcaatctcggctcactgtagtgtcgacctcctaaacttacgcaattttcccacctcagcctcgcaagtagctaggactacagggcacactgccacgcctggctaattttcgtatttttagtagatacggtgtttcctcatgttgtccacgctggtcttgaactcctgagctcaaacaatccacccatcttggcctcccaaaatgctgggattataggtgtgagccactgcgcccagctgcttttttctttttgtaagtatagatgttatctatcaacatccttctgtggaaaaatgaagattcttcctctcccatgctcctccccactagtaggaaatataattccattctcggattccttcaggacagttttataattgagaatagattaatatccagtgtttacacgattatgatgaagcaactattattcctagcctagtcatgttatgtaattacatttcttacagagctccaatattttctcccctttttttgagacaaggtcttgctctgtcacccaggctggagtgcagtggtataatcacagctcaccgcagcctcaatctccctggctccatcaatcctcctgcctcagcctcccaagtagctgggaccacaggcacccaccaccatgcccagctatttttaatagagatgaggtcctgaactcctggactcaagtgtgtgtgttgagtcgagtcctcccaaagtgtgtctgctttggcctcccaaagtgctgggattacaggcatgagccaccgtgcccggcctctttgttttctaggttctgatgcaactcccaactctccaccaggcatgcagatctcttgataggctcacagcactctggcgacctcttgatttccttatctcccctgaagcatcactcctgtcttttttttttttttttttgagacagggtatcactgagtcatccaggctagaatgcagtagtgcaatcatggctcactgcagcctccaactcctgggcccaagtgatcctaatgcctcagcctcctgaggagttgttttcctttcttttttcttgtagagacagggtctcactgtgttgcccaggctggtctcgaactcctggcctcaagcaatcttctcgcctaggtctcctctgtcctactgctgctggactcacagtggccctgggacctcctgtgacaccatttcctctcctgttttcattccctccttttggtggcgtgtgttcctgggcagaaagcctgccctgcatgatggaagtgggtctcctgcctccggtgctaagggagagggtgctggcctcagggcttccagcctgcattccttcctcttctgaattccgtcagggttcatctcctggtttccatgtgtgctggaggctgaagttgatgcctttctcatcccaagcctccctgtgtgagctgggcttttcatccttttttgggagtgttttagacttctcatgtcttgagtgacctcacatttcacagtgatgttcactgtgtagatctttcgcggtccattttgctgggcactgggtgggcctctcggtctgcaaagtcatgtctttgagttctggggcagttttgtgaattacttcattactgagatccttccttgttttctttttggaactcttacttgccacgtgctgggatccaataagctcaaagaatttcacacacaaaaacataaggacaaatacatcaggatacatcataatttccaaaacaacattgtaaaagaacaaagctgtaggatccatactttcaatttcaaaacttactacagaactatagtaatcaaaacagtgtggtaccaccataaggccagacacacagatcaatggaatagcactgagtctagaaatgagcccatacatctgtgagcaacggtgccaggccattccatggggggagcatcgtctcttcaacaagagacgctgagacagacagacatccacaaactcccatgttaaaccatctacaaaaattgactcaaaatcgaacaatgagctaaatctgtacagatcttagaagaagacataggggtacatttccatgaaccttggatttgccaatggatatgacacccaaagcatgagcaacaggaaaaaacaaacaaacaaattttgactccaccaaaactaaaaactgccgtgcatcaaagaacattaagaaagtaaagagaccgggaccaatggctcacgcctgtcaccccagcactttgggaggccgaggtgggcagatcacttgaggtcaggaattcaagaccagcctggccaacatggtgaaaccctgtctccactaaaaatattaaaaattagacgaggcgcagtggctcacacctgtcatcccagcactttgggaggccgaggtgggcagatcacttgaggtcaggaattcgagaccagcctggccaacatggtgaaaccctgtctccactaaaaatattaaaaattagacgaggcgcagtggctcacacctgtcatcccagcactttgggaggccgaggtgggcagatcacttgaggtcaggaattcaagaccagcctggccaacatggtgaaaccctgtctccactaaaaatattaaaaagtagacgaggcgcagtggctcacacctgtaatcccagcactttgggaggccgaggcaggcagatcacaaggtcaggagtttgagaccagcctgaccaacattgtgaaaccccgtctctggtaaaaatacaaaaattagccaggcatggtggtacgtgcctgtaatcccagctcctggggaggctgaggcaggagaactgcttgaacctgagaggcggaggttgcagtgagctgagatcacgctactgcattccagcctgggcgacagagaaagactctgtctcaaaacaataaaaaatacgaaacacaaaaattagctgggcgtggtgttgggaacttgtaatcccagctacttgggaagctgaggcaggagaatagcttgaacccaggaggtgaaggttgcagtgagccaagatcacaccattgcactccagcctgggcaacagagcaagactccatctcaaaaaaaaaaaaagtaaaaagataacctacagaatgggagaaaatatttgcaagtcttatgataagggcttagtatcctgaacatataaagagctcctacaactcaacaaaaagacaacccaatttaaaaacaggagatggattctcccaaaaaataaccaacaggcatatgaaaagatggtcactcaacatcaccaatgattacagaaaggcaaatcaaaaccataatgagacacctcttcatacacactagcatggctataataatttaaaacaagaaaatagcaagtgttgataaggacctggagaaactggaaccctcgggcactgttggtgagaatggaaatcggtgtgaccagtatggaacacagcttgatggttcctcaaaaaataaacatggacgccgggcgcagtggctcacgcctgtcatcccagcactttgggaggctgaggcaggtggatcacctgaggtcaggagttcaagaccagcctggccaacatggtaaaaccctgtctctacaaaaatacaaaaattagccaggcacagtggtgcacacttgtaatcctggctactcgggaggctgaggcaggagaatcgcttgaacccaggaggtggaggttgcagtgagccgagattgtgccattgtactccagcctggcaacagagcaagactccatctcaaaaaaaaaaaaaaaaaaaaattaaacatggagttaccacattaaccagcaatgccactcctgggtacacacccaagaaaagtgaaaagaggtgtccagacatactcggccatgaaggtgcacagcaggttactcacaagggctgaaaagcagaaacaaccaggtgtccatcaccgataaatgaggaaccaaaatgtggtctatccacacaatggcttattattcggccacaaaaagaaaccaagtacacgtgctctgacatgcctgaaaataccatgcaaagtgaaataagttagacacgaggccacaattgtgtgattccatttatatgaaatgtccagaacagggaaaacctattttagacaacagagacacaaagtcgatcagcagttgccaggggaggaggaagacgggaggggaaatgattgcttcacggggtgatgacagaatgttccagaacgtgacagaggtggtgcctacacaactttctggatgtactaaatgccgctgattgttcactttcaagtgattgatttttaggttatttgaatttcatctcaattaaaaaacccaaacacgcaaactgctcccgccagctcagccccgagcagacggcgcagcccgtggaggatgctgagccacccaggcttctccccgccccttcctggactcttctctcttttgcctttaatccactctgcgcagtcattgcctgtgttcatcctacctggccgacttctctctcaatatttccttggtgaaacatcctaagaggaagttacattagagaaaatcacatatttcatctcataggccgtaaacagggccatttaggaagccatgtgttaacgaggggagacggatgctctgtgccgtgtgcagggataacggtgccaggccaggcagttaccaatcacgcgtgtgtttagggctcaggaaagcgaaggagaagtgggcaagggtggcgggcccgctccgcaccgcccagcgctccggacttcacttctggtcccgctcctgggcggccacgaagttcagcaagtcaatggcggtgaccaccccgaacaccatctgccgctgactggacttcccggtgctgtggtctgaggggagaacgaggcagtgggtttgcaggtgccgtgggaggctgggtgggctgctgcggggcaggaggctcctgagggcctggggcacctgtgcaccatgggggcccagggtggctggagcccagcggcgaaggctgtgttcctttttttttttctgagacagggcctcactctgtcccctaggctggagtgcagtggtgcagtcttggctcactgcaacctccacctcctgggttcaagtgattctcgtgcctcagactcccgagtatctgggacttcaggtgcacatcaccacacccagctaatttttgtatttttagtagagatggggttttgccatgttggccaggctggccttgaactcctgacctcaagtgatccacttgcctcggctcccaaagtgctgggattacaggcgtgagccactgtgcctggccaagccagtgttcttctgacatgagccccatgagcccccaggccaggttctacccaccacgtgagtcccctgggccccaggccaggctccacccaccgcaggtcaggacacacccttccctggcccaccggctgagctcctgaggcactcatgacttcagagccggtgtgggcatgaaattcaaacccgcttacagggccgggcacagtggctcacacctgtgatcccagcgctgtgggaggccaaggtgggaggatcatttaagcccggaagtctgggaccagcctgggcaacatattgagaccctgtctctacagaatatttttaaaaataaattagtcgagcatggtggcacacgcttgtggtcccagctacttgggagactgaggcagaaggatcagttgagcacagcaggtcgaggctgcagcgagctatgatggcactactgcactccagtcggcaacagagcaagaccctgtctctaaaaacagacaaaaaccccttgccaccatgggcagcacacagcttccatctctggcctgattctgtcttcacccctcctgctttctcctggcaagcgtagacccggtgttaatgctggccgaggctcccatgccacatacccagacagggctgttgtgatggttaattttaatacagattaacggggccgtgggagcccaggcattggtcacacgtcgttctgggcatgtgtgaggggattccggattagcacaagagtcaagaggcagataacgtgtgctactgtggagggcctcacccaagcagttgaaggcctgaatagaaccaaaggtggaatttcctgccttggggcttgaactgctggctctccagtctccggcctgccgcctcaccctgcagatctcagggtttgtcagcctccgtgatctcatgatccagttccttaacacagatctcgttccctctctctccccgctccccacacatcctcttggtcctgcgtctccacaggaccctacaccagctgtcatgaggcacagaggggtgagcaaggtgcgggtgaggaagagccctcggagcccgtcccaactccgccacggctgtcactcctctctttgtaggcagaggtcccttggggtggcccacttagagccccaggaaaagatagggaacacagatgagatcagctccttgcattttggggaaacggaggcacagcaactgttggagaagggagccctgggagccctgagtgccgcaggcttctgtggccctggcagctcggcccagagtcaatggactagggccagccaggggactttccgacaagggccagctggtggtattttaggtcttgggggctgtgccgtctctgttatgagcacgcagccctgacgtgcttgaaagcagccacagacggtggtgacaagcgtggacatgctccaggaagacttgatttggggaccctgacattggaatttgcatctttttttttttctgagatgttcaaacacaagtaaatgtgagattaagagggggatccctcctacccaagcttgggggtgggtccaggaccctggaaggcctccatttgccatggggaggctgtgaatctgagcctgagagccattctgaggggtgggtgatacctacctgcaggcccccccaccacgcctgcccaggcctggtcctgcgctgcagagccaaggacgggagatggggttagacttggggccctcacggaccagcctcagccaccgagcgctcaccccctgcacacaggcctggtgggtgggcaggctccaggctccagggcccctcccaactcttcctgtgggccccaggcccagggctgccatctatgacccaaaacctgcgagcgactctcctggcctgtggggatgtggtggggacgcccggggatgcgctcaggagttgcaaaacctcatgagcttgctgggagcggggctctgaggacagcccatcagtggctcctgtgagacccacatgaggcttccattcagagcagccctccgaatgccagggtcaggacttgaaacccttctagatgtttctgggcttgtccctgagaatccccaagactgctggcctccccggaggcaaggggcctggactcctgagcctctgcatgctggacaaagggccctacccagtgtggcctgatgaggggtccctgcaggaatcacaggtacagcccaccagcccagggcatgtgggaggcccgggcataaagactgggtgtcactgaaggtcggcaccacccactcccctaacaccccgcaggggatggggggcccagctgctgcccatggcagaggccaggcttggtggcctgaccccagtgagaaccccacgcacagagcagggccccactcacactggatctgctcgtgcaccaccagggcgaagtggtccatctccaggatgtgcgagagcctgcccagcgtgtccgtgaggcggatctgcaagggaagcgtggtcagtggcagggggaacatggccccacgagttttctgtggagtgagaggggatgcgatggtgggtcctgcaaagcccacccgggaggcagtggcagccgaacgtgggaaatacgtggattcgggtgacgtctcgggtgtgtgtgtgagatgggaaagaagtcgaattcactcctaggtttgggcagaaccctcagcctttccagtgtcaagagccacacctgcatgtcccaggggatccgtgtggaaggtcacacaaactttcctgggccaccctcagggcagcagagggtgggtgtctcaggacaaccacggagtctgaccagcccggcaaggagccaccgtgggcttctcccagaatgttctagctcttgttggataaccaagtgcatgcacaggcaaatgaggctgggcaggagaaagaccccagcagacgccgcatggtgcccgggacagcctctgagcgcgaatgacctccttaagtccccaaaacacggctggtgtggatgagcctgcactgatgagagcctcctctccggctgctgcacttgtaaagtgggtgcttctcagcttcatggtttgaggggtgcagccagcttcggcctaagtggtgttgagggtcgaggacccagcacccccacacgggaagcgcggtgtcccgccttcgaggctggagtactctggcaccctctggggtcccgaagtgcctgagtacctgtttgagccgcgtgtaggtgactgcgcacctgtttgaactgcgtgtaggtgaccgcgcacctgtttgagctgcctgtagctgaccgggcacctgtttgagctgcctgtaggtgaccgcgcacctgtttgagctgcctgtaggtgactgggcacccgtttgagctgcctgtaggtgaccgcgcacccgtttgagctgcctgtaggtgaccgggcacccgtttgagctgcctgtaggtgaccgggcacccgtttgagctgcctgtaggtgactgggcacccgtttgagctgcctgtaggtgaccgcgcacccgcttgagctgcctgtagctgaccgcgcacctgtttgagctgcctgtaggtgaccgggtacctgtttgagctgcctgtaggtgaccgctcacctgtttgagctgcctgtaggtgaccgcgcacctgtttgagctgcgtgtaggtgaccgggcacctgtttgagctgcctgtaggtgactgcgcatctgtttgagctgcctgtaggtgactgggtacctgtttgaactgcttgtagatgactttgccaacttggtctgacggctgcaccttcccggcaagcagggacgagagcatgttcccaagcgtcaccattcccaggattaccctgtgggacgggggcaggcaggggtcagcgctcatacctcacccctcccaggacggtggggcacacgctcagctgccccagggaggagcgctctctggccacacatggaagtcctctgccacgagcctacacgcggcaggaaccagtctgggccctggtggggagaaagaaaccaagagtccttggacccgttcagccagggtcaagggtgaccagccgtcaggtttccgcgacgtggggctctcagtggtcactgggcatgtgtgccaaggctttctgctgtcagacatgtcctcggggcatctctcccctgacctccaggtgggcccaggacagcctgcacacaaagggtgggtgggctgaggtctgagggcctggagtgagcacggcagccctgccccaggctgctcagggaccggcaaggggcctccaatgccctgaacgtctgtatgaggcggcccaggcgggcctatcagcccagctgcagggtctgcatggctgccctgtccagtgacactgacggggtggagctgggcagacagaacccaggactgagctctgagcaggggctgagactgaccccgcctcatccaccacgggcgcctggtcgaagcccttctcccggaggatctcgatggtgtgcccacaggtgatggtcgggagcacggtcagcggggctgacaggcccagctcctgaacacggaggtgccaccacctgagggaagagggcaggtcggggggatcaggataaggacaaacgctctcgcacccccgccggcagcacctcagcaggaggccacagggaccgctctcctgcctgtcacactgggcagggccagcacaggccacggggaccgctctcctgcctgtcacactgggcagggccagcacaggccacgggggagtgctctcctgcctgtcacactgggcagggccagcacaggcagcgggtctccggccgagcggtcttaccagggcttcttctccgtgaggtcctcctccttcagaaagcccttctgcagcatccacctgtcgctcaggaacttggtcctgcgggatgggggagtcaccgagtccccgcagggccccaccgggcccccgcccctgctgagtggcacgcactgcctgcccagcccctctcctggacctcactggtgcagcagagacccccaagtgctggctggaagccccagggggaagcctgggggctggacttcccgcccccatggccaacaagcgtgtgtgagcatgcacacagccatcgctcaggcactcagataaacacgtcctctcatgctcgctctctgcccctcacacactcacacgcacaggtacacatggcaggctggccaagtatgtggggagatggtgttcttgcactgacgggggtgggcaggagccctgcacagggcatcttgaccctgggcaccagatgtgaatcaccccacactggggaacccaactgggggcacccaccagccaggcctggccctccaagggcagctgagctctcgggagctgtgtagccgctgcagcttgcaggccatggaggaaaccctgcaggtgcaggggacagggcatgggggtctgtagacacccgccctggtaccgcctccggagaccaggtgcagagcagcgccagtctcagcctggctgcccggtgaccagcgaggtctgtggcgttactgtccgaggggcctctgggcaaaacagtcacagcaagtcctagggggccacctgggcagcactcgttcccaatctggagtttgggggaagcagcagagggagtcagggtggataggaggtggcacagggcccggcccaagaggacgtcagtccatgtggccagggctacccgttggagctcacggaccccagagcagtgagggggacagacaccagagaggaagggacaggagggacagagagggagccaccgtctttcatgcccctcctgtcagggctgtcactgcgagtgtgcattgattttcacagcattaagaggctgggaagccccacagcgtgagggcacgtgggcaggagagtggaggcggtgctcacagggccccgctggcctcctcccctcccagttctggctgccggttctcaggtgaggcgtgagaggcatccagggaagggtggcaggatggagaggagcagggacctgggagggaagccgtgtcttacatgtagttccgcactgagtcgggcagaatgaccacgcagcgctggccctcctgcagctcctgcgcggccttcacggccaccgccaccgtgctgccagcactgccacctgcagagagggccacgagtcagacgcgccagggtgagcgtgcgtgggtgcacacgtatgcatgaattgtgcacgtgcacgcatgggagcatgtcagacacactccgaaggatccgtcaagaggggttgcctcggggagaggggctgggaggaccccacttctccgtgagcatcggcttcttccttgtgcaccatggagtttctgtgtccactcggggcttcataatgagctggggtgggcactggtgccagggaaatgcctgcagtggggctgcggcccctggcaaacctcctggccctgagcctagagccagcgatgctacgaggacggagcccccagcaccacgcctgcaggctgcctgactgcacactgggctctgctttataaacaagagaccaaggctcacagtgacaccagctgtccctaggagccctgaagtcagagtcagaggcgtcttctctgggcttagtttgagggtgcacacagcagtcgggaaggtctaagtctgcagtaggagcccccacaggaagagaggcaccctcctctgtaacggggcccatggacctgctttccagccccaaaggcaggggcttgtttctccaccaacatggggagcagggagactgagacagggagagcccaacgattatgggcaccaagtcacctttcgtgacagattcatctggaaaatgcttttcttttcttttttttttttttgagatggagtttttgctcttatcacccaggctggagtgcaatggcgtgatctcggctcactgcaacctccacctcccaggttcaagcaattctcttgcctcagcctcccgagtagctgggattacaggcatgcaccattacatcggctacttttttttttttttttggtatttttagtagagacggggtttctccctgttggccaggctggtcttgaactcctgacctcaggtgatccacccgcctcgacctcccaaagtgctgggattataggcatgagccaacgcgcctggctgggaaatggtttttcaatcaagactttcttccaatctctagtttggggctcagctaacgggggacttggccatgctgagggctggtttccttccactttccctgtcaccacccccaaagtgacatgacacacggaatgcacatgtagaaacctcacatgtccctgcctgcgttttagaagctggtgtgtgctctccgagtccccagaggtctagatcaactatggtccctacagggcctctgctgcctgtgtggctagtcagtggcattgccagcggccacctggtctgtccacccccaagcaggtgggcagaggggcacggggtaggaggaaggtgagcggggtcgagctggacagcctcaggctccagtcccctccccagctgctccagggtgctcgcagcacccagtcccggccatgggccccgtcaatgcagagccaccgccccaggggccctggtggacttgattagaaacaataagtgccatgagagcttcagccttgttctagaaacacattctggaaggcagctcgaagccccgccccatggcctcctgccctcacctgagcaggtgaccacactgggcaggcagacaacacctgaggctcgtggccgccgcagtgacactcctcagaactgctgtcttacacatgcaggtcggtggctgactgagggtgcgcccccagccatccccagtgccccctagccatctctgccttccccatacccccgtgcccgccacccactcaccgcacagcagcccctcttgcgcgatcagcatgcgggcaaaggtgaacgcctcctcatcgttgctcttgaaccacttgtccaccacctgagcaggaccccaccacagcccgtcagcgtgggagccgctcccacgtgaccaagagggtgaacagcctcatggtggaccccgtgtctaggcggtaggaccccagaggtctcaccccagcctctccccctgggatcggcacgtctgcagactttccagttccaacacgttttgcagacagcaaaactgcccgccagccccactgagcatccgtgtgacccacaccggcccttcggtctctgctctccctcaggccaaagtcagctttttggctcttaacagacttttccggggccttaattttcacacgttttccctgctccctgcctgtgccacctgggctacatcccttggtgaggtcaggccacgtgtgcggacatcgtcccccagtctactttgtctcgaccttcgagaccagcttctcaccatgcgtgcggggcttgcccttctgtttcagtggagaagctggttggggcccagggtcagccaggctccccagtgtgagggtgagttacaggctgcaccggcactgtggccgggctctggactcgacctaccgtcctgtccagcaccgtggggatgaagtcgtagccgatcccttccacctcgtaggttgtctgctccgtctggttcagctcctccggctctgcgaggatggacccttcgggatccaccccaatgatctgcagagggcgcggcttcagggctcaaggccagcaaaagccccgcctggacatgcctcgatattctattatgggagtggccaataccgccgttaacaactgcctgttaatgatctgcctgtgggtggtggcctgttcccagcctcagaggcaggatgagaaacccaagaacccaggctccaagtattaaagcggtaatgacctaaatgttcagtgcagggcgctcagaagtaaaggcaggtgcctgggaggaactgacctccccggggtgcttctcggagcggggcccccaggacagtccagacagaccaccctgcggcggagcagcagagcctttggggacaaagggcattgctgggcagtgacgtctttttcaagggcaagcaacagggagagaacgcccttgtctcatcagcgggacctttctaggcacccgtcctcagacctgctcttaaccccgagtccaggaaccctctcccaactcccacaagccccagttgaggggcagactcaggaccagaggacttagagctcctggctgatcctcagaggcccccagttggaactccgaccccccactcagtgcaggaaggttctccaagacactggccggtgagcgagcacccagccccagctccttcgggtcacgagctgctggtcccttatgtgtcaagcacccttgtcttcccaaacacctcccaggcagcgcagaaataccgcgggagacagcgtgctgagcagaccgtgaggaatgacagctttcagctcagaagccggggccactccgcactgcccctctccggcccggccacaccactcaccctgcatccaggacacttctccttcagcttcctggcaatgcccgtgatggtgccgcccgtgcccactgaagccaccagcatgtccagcttccctggtggacggataacattcttgggtccctgcctggccagcccatcactcatagtaataatcattgaaaacacactcagcccaaaccacggtgggtaaccaaaaagttcaaaagaaaaacttcttctccagttggagcagccctcgttgctgcccttggtctgtgaaagcctcagaaacaggcagcctggggcaccccagcccagtctttgctcagtgacactcgacccctaaaacccccatttggctggatgcagaaagacaggaccctgtccggggggtgcaggcgctgagggcgggcagagggaggctgtgaattaaccacctccgtgggctgttggatgtttgcgtggtgtgagtgagttaactgaatttacacaggaaatggaatcagtcttttaggcttcagcgcagaaactcgctgggcgctcacactgctggccgccagcgcgggcatctggtggagaagtcacagcagggaaagactcagcgagacggagcagcttgggcacccatgctgagacaggactgtttttgccaaatgagagagttctcacacataaagcccaaacaaccaaatgcctggaccttacagcccggctcctgggcacggactgagggtgtactccagcccatgccaacaccggattcccaataggaagccagggcgccaacctcttggcaacttatctctaaagggatctcttgggaaaacctcagtaccaacccccacaggccttggcaccgagtccctggaaaagggcccaaggagccggcctcatgcttgtaacagagagtgagctcatcgcagatgtcaccagctctgttctgcagatgaatttgatgccgagtcagggcatgatcccaaatgaagtccaagctgtgagcccagcaccagcctgggccctgaacagactcgctgtctgcattatctgcaggaggagcccctgcagacctgcagagattgctgggtaaacaaatacagccatgccctgtgtttgctattacaggtaaaccacaggcggaggccaagagggcacaacggagggaggaaattgttctagagaaatgctctagaaaagcatttcacagagggaacatttgagctgggttctgaagggtgaataggagttcaccaaggagagggcaagagatgtgtacactcccaggcagccagggataaatgcaatcaagatggacagagggacgcaccatcacactgctgcaggatctcatcagcggtggtgtcatagtgagccagggggttgctggcgttgcggtactgcatagaaagagagcagagcccgtgagctgacccctgacacctcagtcacccccacatccctgaccgagaccctcctagggaatgcctgtctccaggccccaggtgcctcacctggtctaggatgtgagaattggggatttcgttcttcagccgccaggccacccccacgtgtgactccggggagtcgaacctggcattggtgggcgtcctcacaatctcagcccccagtgcccgcagcacgtccacctgcaggagggaaagcggtggcctgcaccttccgcctggcccaggcaccctcatcccctgccctatgaccccgcccctggccacgcccacccaccttctcggagctcatcttctctggcatcacgatgatgcagcgatagcccctcactgccgcagccagggccagcccgatccctgagggcacacagagggtgagaggggcccagtgaccccccaagccctgccccgcccctgcctgggacacaggggcacaccccgatgccggttcccttagggcccagggaagagggttctgtgggattccaaaattgcccaacatggctgcttctgccttcaagtgcagggggagagaggctgccagaggcagaaataaaaggtacacgtcaaggaggaggaggcagcggcgcaggacaggagatctggttcctccaggcccagccgggtacacaggcacaggaagagcagactccgggtgctcgtcttgtgtgccaggcactgccaggtgccatcgccccgagagcatcggcactggccccgaatgctggtcaaaggaagctaggttgggacacaggccggcagcgggtgcaagatgccagggagcaggcggccaggcgggccagcacatgcggctgcagctcatccatcccccccgggtcccggcaggctcggcatgggtaggggacagccagccccggccaccccctctgggcctggcacccaccggtgttcccggatgtcggctcgataatcgtgtccccgggcttcagcgtcccgtcgcgctcagcatcctcaatcatccgcaggctgatgcggtccttcacgctcccgcccgcgttgaagaactcacacttggccactgggaggcagagatgaatcacagaggggaccccctgaccacccccccattgattcctgctcacccccccattacctgatacaccccagggtgggggacgggcttgggggtctgtgggttctgaaaaattgccacctctccactcacctcccctacacctgcacctgggcactagcctatcagagcttctccccctgcagcccatcctaccggtcctgcagggcgctgagcaactctgtgggaaccagagaggcataagcagccctcactggggggcgccgcagaaaaccccgtccccccacccacgagctgggcttgtggcgggcaggcgcctggatttgggtcccctacgcccctatgcccagccatacccagcggcccctgccaaagcagcttgatgtcctgaagccacagcactggcttccccatcggatggggactcgcatactctccctacagcctcccattgtcctccttcccctgtggggcgtcacctgcccggggaagggctccctgcgcagttcccgcacaaggccaaggccttcacttgcacttccttccttactgcaagtcctctctccctctccagctcttaaaaatatttagtttttaagagcgagagaatgggctgcatgaaatgtgatttgagggacctgggaccagcctgcagcacctcaaaatttctgaaagcaaccaccagacaggtgttgcccctagaaccaggacgaggcgctgtgtgtggtggggaggactctcggggtctggccctctacaggcctgcattctcggacccctctgggtcccatactgtgaaaccctcagttagatcattctcactagcgcctgggggccagctccgaagcagaaatcagagctggtggcctccggcaagccacgtgaccaacctgaccctcggtgtgtctgtctgtaaaacgggcattccaaaacctacttcaagggcaaccgccaagtttagacgtcatcctgtacggagcacagtgagccagccacgcgtgctgcgtacgagttaagggtccctattgtctgacaaatgagcacagagccggccctgctgccttgggggtctctgtgaagggggctgctctgctgcagctccgagatctccttccctagaggggggcagaggagggccaggctcccacgaggcccctcctgtgaatcggcgatcggttcccaacgcaccgacccctgacttccttcccccagcgcctgccccagctctcacaggtcccccggctgggacattagagcatctcaggatgaaaaagtcccaagccatgttactggttccctctccttcccactcgaactccaccccctccatctggccctgtcgcggggttctccgcggcacccttcctgcctccctccgaactcacttgaccttggtcatctgaaatacgaaattccgtccccgccttgtccccaaggcctctgcacccacagctttctctgtgacgatgctgaggtctaccagggctctgcgctcttggtgaagagcgacccttaggaattccctccacgctcttgagcctggaaactgcgtcctgcaaagaaatgcccttccccggaggcctcagaccacacctcaggtgaccccctgcgcacccaggacgaggccagccacagaccctccaaattcccattctctgtctcataaatgatgagctgaactatctgtccccacgaagctggcaagacagaggtaaccgctccctggacagcgggtggctcacagcacgtgctaggacccgtccactgctccttagcaggcatgacgctaaccctccccacctgcttgcttctgcctttgaccctcacccggcccttcacaccctcgctgcttccactccggcctcagttcaaaggtcacctgttcgttcccttgtccatctgctggggagtcactttggtcaccctctgacacaatgccctgttgtgtgtttttcccaaacttaagctgatatgttcttggccactcattaaccagcgagttttctgatcccagggccttgcctaagggatccatcccaggaccccccaggaccccccaggcccacggagcccagtgtagatggaggaagcccctctccaaagccagggcactcacagagctcacacttcaggccgaacttcttcccaatcttgttgattctgaccataggggtgtccccgattttcttcagaatatctggcaagatttttggagattttgccctgaaacagaggagtccacaattattcaggaaaaaaaaaaaaaaatagtaccagccctggcagacattgtcttacacaaatcaacactcgaagaactggaaaaaaaaaaaaaaaaaaaaaaagaactggctttatctgggtggtggttacacaaatctgtacacagatacacctaacacacatcccacacacacgcctgaaacacacatacacacacatgcttagacatacaaatctataaaaagcaaatcatgcctgtggtttatttgcaccaatgccagcttcccaggtttgaaaatgaacctacagtcgtggcagatgttgttagtgggaagctgggagaagggtacaaaggatctattatttttgccacttattgtgagtagtaaattatttccaaataaaaaagttaaaataagcaaatactgactccaaaacaaaggtttaggtccaccttttcagaaaggctttactggagatgacatttcctttcatctctcagcatgtgaccataggaagcaaaaaagtgtcagggcagagactccttagaccagggacaatggctgcaaagcgcaggcgggatgtctagccctgcacagaaaatgtcaggcacgtggcagactcagagccccggcagaggcgctgtcggccaggctcgtgatgccctgccctgcagcatctggctgtgtaaaccctcaaaccctggtccaggtggtttcctaaatggccctcatgcccctgccatcctcccccagggagatgctgatgacaccccctatctatctgcaccaagctcaccacatactcatctgggaacacgcatggcttacagcggtctccagacccgcaacccctccctgggccttgcagctccgatgacaccccgtggctaaccctgggccccctcttcagcacagtcacctgctgaacagccagggtccttgggtcctgccccccaggaggcgacccttagacctggggtgaacccagctcccagaggtcctgtgccatggagggagtgccacatttgcagggagagctaccctgaaggccaaaacaggcgccaacaagagcagctggaatccaatcgcacccttcccggggagcagaaggcagtcctgccaggtccccaaactgtacaggggccagggaggttccctcagaagcagttctcggcagaagggaaccaggcttggcaggtgtagagagccagggccaggtggaaagccaagccccagggtgacagcgccggggattagttcattaattcagttcgggcatctggccagccaggcgggaagagtcccgcctccctgcagcaggtgtgctgactcagcactgggcctcggtggctgtgaagttacctgagaagtttgcagaggtgatcagggccaggcccagagcgcttagcaagaaaaaggatgtgacttgcagggatagccctggagccccttatctcaaggactcccacttccacagcccaagagtctcctgggaggacacgccactgtcctagaatgaacctccaactcctgacccacctctgcagcacctccccgcaacgccactattctcaggggccctccgactggagacaagcggcgtcggctctgcgtctcaggatgggggtgtcttcggaggatgaatgaggccagtatgtgaggtgcaggtgcaacgccatttacaacctggagggcatcgtctccttctcatgccctagagttaggagctcacggagccctcaggaatcgggcctgtcttccctgcccactccaccctccagcagccactcccgacctcaccgggcctctcacccactgctctcttgggtttgtcttggcagcaagagcccatcctcctggctgcccacacatctgcttggcctcctgagctcccagcactgagtatgtttgacactcagaccttctgggtttgtccactgtcacttctttctttctattgctgcactgagagtacacccagccacccccacccattctgaactgtaaatcaacaaccataaacgctggtagtggtggacacaaaataggaatcataatcccagcactttgggaggccgaggcgagtggatcaactgaggtcaggagttcaagaccagcctggacaacatggtgaaaccccatctctattaaaagcataaaaatccaccgggcgtgctggcacatgcctgtaatcccagctactagggaggctgaggtaggagaatcgcttcccgggaggcagaagttgcagtgagctgagatcgcgccactgcactccagcctgggtgacagcgagactctgtctcaaaaaaaaaaaaaaaaaaaaaaggaatcaaacatctaagaagcacattctttgatctatttgttctcctccaagattacactaaggaaataaagataatcctaaggcttagtgagcttgatttcagtttcatgctggggtagggatttttgttgatttgtcttttccactgatagatcttctgcgccttgagcagggcacgaaatgcacatggcgctgaggaaagacttgttggctaaatgaatgtgtcgtatcttctattgcagttatgtaaaatgaggtaactgcaaacatctatctaccccgtagagggcttacaaaatgatggcttcttcaccgaacagtctgtgccaccagaaaaacagcccttatggaaaaatatgtaatgcctacgggaagtcttcatgacctagagttaacggaaaagtgcaggctgggccgggcgcggtggctcacacctgtaatcccaacacttgtgggaggccaaggcaggcggatcacttgaacctaggcattcaagaccagcctgggtgaaaccccatctcctaaaaatacaaaaatcagctgggtgtgatggtgggcacccatagtcccagctacttgggaggctgaggtgggaggatcccttaactgggggagattgaggctgcagtaagccatgattgcaccactgcactccagctcgtgtctcaaaaaaataaaaaataaataaataagagagcgcaggcaggatcctggtccctcacctccagtgaatgtgcacacgcagccacagaccgggcaaagcatgtgacctgggcacatttatttatttattctggaactacttgctgagcatccactgtcttgccaggcactggcctaggcgctgggctgcagcgtaaggaggccttggcctctcagagcctcatctacacggcatggccccacccccagctcctcaatccagagtgactacagggggttacacctcatgtcctcctggctgtgtggtgtccaggtaacaaactcctgccctccaggttatggatcagccctcttgtgatcaaaagcaggacttacggggcagtgtggtgatgtggggactcggaggcaggccggcccagctgccaggtgcacctgctcggagcatcgggccggatccacaggggctccttggcttccttatcctctggggaccccttctccaggctccccttcgccgagtgtggccctgagcggtgggggcagcctgtgggccccacttctgcctggggggtctcagaaggcatgctgggacctggcaaagcaaggagagaggcgtcggttcaggctcggatgctgtggggttccagcgaaccctgctgacccggccccctctgggaggcgtgctctgctccctcagagaagcccaggaagaactgcacaaaaacacaggcaccagccctgtgggcagccgcttggccatttctctcctataggcatataccaaaaaaaatggaagcagacagttgcttgggccgggtgcggtggctcacgcctctcatcccagcacttcgggaggctgaggcaggaggaccacttgagtccacgaggtcaagaccagcctgggctccagccccatctctatttaaaaaataaaacaacaacaacaaaacagatgcttgcacacccatgctcactgctgcactattcacaagtcaaaacgtggaggcagcccacgtatccgcagacggatgaacacacacagtaggctcatacacacactagaatattactcagccctaagagaaatgaattctggcacacgctacaacacggacgaaccttcaggacattatgccaagcgaaatgagccagacacaaaaggacaaatactgtgtgattccacttccacgatgaggcacctgggactctcgaacgcccctctatgtctggcaaattcatagagatagaaagtagaatagaagcggccagcggctgaggtgagtggggaagggagggtgattgtttaatgggtgcagaggttgtgctggggatgatgaaaacgttctgggtggagatagtcacggtggttgcctcacacttagaaatggttacagtgatcagtgttacgtgtattttacccaggattaaaaacacacacacgcacctgaaatagatgagacagaaaaaaaaaagaagaaagcaaaaagaaagccaggcgaggtcccatctgctgcccctcctctggggggacaaggaacccacgaccacctcccaccttgccttcttcagagggcccaggactgggctcagccccgcttcaccctcctttgattccccacattcaacaggaagactaagtccacagccgtcactcaccggacagatggtgctgacagttcagcaccgctcaaactctgtaaggagacgtgacaacagaatctgtcatgggatcctggaatagaaaagggcagtgaggagaaaactctgcaaatctgactcaagcgcggactttggttaatgtcaacaatggttatgtgatcgtggaattggctcattaattgtaacaaataggccgggcgcggtggctcacgcctgtaatcccagcactttgggaggccgaggcgggcggatcatgaggtcaagagatcgagaccatcctggccaacatggtgaaaccccgtttctactaaaactacaaaaattagccaagcatggtggcgcacacctgtagtcccagctactcgggaagctgaggcaggagaatcgcttgaacccgggagggggaggtcagtgagccgagatcgcgccactgcactccagcctggcaacagagcgagactccgtctcaaaaaataaaaataaaaataaaaataaaagaaaataaataaagtaacaaatatacgacatcagtttaagatcttaataacaggggaaactgggggaactctatctattttttcaatttttctaaatctaaaactgctcttttttaaattttcgagacggagtctccctcttgttgcccaggctggagcagtggtgcgatctcggctcactgcaacctccacctcccgggttcaagcagttctcctgtctcagcctcctgagtaggattacagacgcccgccaccacatccggctaatttttgtatttttagtagagacgaagtttcaccatgttggccaggctggtctcgaactcctgacctcaggtgattcgcccgcctagcctctcaaagtgctgggattataggagtgagccaccccgcccggcctaaaactgctttttttttaaaaagcctattaaaaaagaaaaagttgcggaagccggctgcctttggaagcccttggagtatgctgttcaggtggtctctgcgcacaggccctacccaggcctcagcttggcctcctggacttcccagcctcccctccacctttgcaattcaccagactgggggccaaagcggcttcaaacgaccctggagggtggtgctttcaaggtcttgggaccacggacttgtctgaaaatccgaaggcgttggatcttctcttccccagaaaaatgcacccgctttcagaggttcgtgtcccacgcttttctttctatcccaaccttgtaagaagccgccgccgtgagcggagcagcaccttcctccgcgggtcgcgggagtcacctacgggaagggactctccgtctggcacaggccctgtctggcctggggcgcgcatgctccgccgccgaatcttccagaaagccgtggacccgaggccccggcagacgcaggcggcccagcgccttgcttttggcccctcgcctcgccctggagccctctctcgcaaggtaagggactgccgggaacgcagatcgcaagccgtcggggctctgtagaactcagaggcgctcggcggaaagctcgccaggcgacccagacccgaacccgcgggctccccaagacaacagcgccgggcggccggatgcacgtgcgtcccgggaaggcgggttcagctggcatcgcctggccggttccgttcgctccttaaaccacaagacccccttggggtcacgacgttcccggggcacccctgcactcgcgcgccagcactcccggaggggcctggggaaggccacgcgcacggagagcgggaaactcctctaggtttccaggtgggagatccagaccctactgagacccggaaaccgccggccactccgcctccggaagcgacactttgggacaaagctggggacaagtaagcccagaagatcctcgggaagccgagaatttcgcgctccgctctcccacccacgctccgcctcccgcttgcatcctacagctcagctgcggtctcgcctggggctcagggaagtgaggtcccaggaaaacctccatcccccgaacgcaacctgggcagagccccgcgtccctcccccagcgggcacccacctcgcgtgccgcccgcgcaacgacagcgtttaccgccaccccacacggtccgccaaaaagggcgatttgcaaacagccatttcccatccacaatgcagcgaactcaatgctgggcaccgaaacgtgcatctcccccggattcccaccccgcgtccctgctccacgctccaggactcgccgccagtggggtccactccgccggcgcgggggctggggtgggagcccggggccacgtgcacggccagcccccatcttctgggcggtcaagaccgcaggcgtgggcgccggtggggcgggggtcttgggagaccctgtctcgccgcctttcggtgcagatgatgcaactctgggcggaggcgcggagagggaaaccgggacccagttgagatcctctgtccagagaggggagcgagtctcggtggggccggatctcacctggacggatacatggaaaagaggggcgagcggctgccccgactgcggcgaggcggagacggcgaccccggggtggcggcctcgcggggacccacggcgaggggagcaggcgggcggtgattggcggagaggcgggggcggaggccggcgccggccaatgtctcgtggcagagcacccgcccgcccagcccctcctccaccccacccagcccgggcccctcccccccaccccttccccaccccgccgcagcctgggaccctccggcctgcccgacccccgccctccccgggaccccggcatgcccccaccccagtccgcccgccccattcccacgccctgttgattcaaccgcagacccgggtcgccgccccctcccccgccttcctcttcgcctgagcccgcccgccccgggttccagccacccccacccgcggaccccggtggtgtcttctacctggtgttccgatgctgttttacttggttaacttcttgcccttcgggaatttaaggaacctttactgatgagcttgaaacgtgcgtcctggtgggtggggggccctgcgcgtcctcgaggaccgaccccgagggcgtgtgtcgcgggcccgggagggggcgccgcgccggggcgggactcgatggccgcgctctgtggccgccggacgccgtgcgcagcgccccgcgtgaccgcgcccagagccgggtccgaaccccgagccgaggcgcagaacagtcgccttgcgcggctccggtgcggcccacggccaggggctgccgggcgctctcggggacggggccgactccgcgcagggtggtagcaggggcgccccgcggggctccttcgccaggtcccggaggccgcgggcggggccgtttcccaaacatcgtgctctggactttcagaggctgaacctgatccccccgccctatggctaaatgggggatcccaggcccccgagtctccccccggacctgcagcgaaagacacggacggtgcccatcagctctgggcagaggaacgtgctgcgcctccgcagcgtccccggctcaggtcagagcgatgttccgcagcctcctccggcccgcgcagctccgccgcggtctctgccacgtggggctcacagtaggggagggagtgagacgtgaattagaattaaatgtccactggcaggaactgacacgaagaacaataaagccggcgatgtggggaggggacagggatggagttacatcatgaaggctctggaaggtggcattggaggccgggatcgcgccactgtcctccagcctgtgcgactgagcgagactgtctccagaaaaaaaaaaaaaaaaaaaaaaatcctgtccagtctttataagaagagagacgtggacacagacacgcggagagaaaaaggccatgtggagatggcggcagagatgagatgtgctgccaccagacgagaaatggcagggatggctggcggcctccacagggctgggaaaggtggccagggcctccctcagagccttcagccagcctgcgggagagaaagatgataaacggtgttgtttttgttgttgttgtttgagacagagtctgtgtcacacaggctggagtgcaatggtgagatcttggctcactgcagcctcagcctcccgggttcaagcgattctcctgcctcagccacccgagtagctgggattacaggcacgcaccaccatgccaggctaatttttgtatttttagtagagacggggtttcatcatgttgaccaagctggtctcgaacccctaacatcaggtgatccatccgcctcggcctcccaaaagtgctaggctcacaggagtgagccaccgcgcccagcccaatgtgtgttgttttaaaccactcaagtttgcagtaatttgttacacagcccaaatactttttaattttttagaaattttaacgtaattttagattagaaaagtggcaagaaccatacagaatgtcatattccctcatccagattttccaaatattaattttttttgcttctattatcagaaactcattgttatttcaaatgttaagtttttactacatttgctccctctctgtctctccacacacacacacacacacacacacacacacacgtgtgcaggtgtgtatgaatctgtcactcagtctatctggtttctctaacttgttattttgttttgttttgtttctttttgagacagaatctttctctgtcacccacgctggagtgcagtggtgtgatttcagctcactgcaacctcccccccacgctggagtgcagtggtgtgatttcggctcactgcaacctccctctcccgggttcaagcgattcttctgcctcagcctcccaagtagctgggattacgggtgcctgccaccacacctggctattttttgtatttttttttaagtagagacggggtttcaccatgttggacaggctggtctcgaactcgtggcctcaggtgatccacctgcctcggcctcccaaagtgctgggattacaggggtaagccactgcagccagcccactctctagttttaacacttactgatgattttgtctgaattgatttttattaaaatggttgctgagctgtggctcacacctgtaatcccagcactttgggaggctgaggcgggcgcatcacgaggtcaagagattgagaccagcctggccaacatggtgaaacctcgcctctactaaaaatacaaaaattagctgggcatggtggtgcgtgcctgtaatcccagctactcgggagactgaggcaggagaatcacttgaaccaaggactcggaggttgcagtgagctgagattgtgtcattgcactccagcctggcgacagagcaagactccgtctcaaaaaaaaaaaaaaagtaaataaataagtaaaataaaataaaataaaatggttgctgaatagtggtttttctaagcccatcactcctccatgtaccatttggcattccattattagagttttccttctccctcatttatttattcacttagttatatcaatgtgagccgtaggtcctattttaaaatgaaaaagctacacctgaccactgaaagtgcacgaatggccaagtggggtggctcacacctgtaatcccagcactttgggaggccaaggtgggaggatcacctgaggtccggagtttgagatcagcctggtcaacatagcaaaaccccgtctctagtctctactaaaaatacaaaaactggccagcgcaatggctcacgcctgtaatcccagcactttgggaggccaaggcgggtggatcgcctgaggtcaggagttcgagaccaccctagccaacatggtgaaaccccgtctctactaaaaatacaaaaaaaaaagaaagaaagaaagaaagaaagaaaaaatacagctggttgtggtggcaggcacctgtaatcccagctactcgggaggctggagcaggagaatcgcctgaacttgggaggtggaggttgcagtgagctgagatcgcgccactacactccagcctgggcaacaagagcgaaactccatctcaaaaaaaaaaaaaaagaaaaaaagaaaaaagaaaaacacatctccccggccctcatcattttctagcctctgcctcatttctgtgtctgcctacatgagaggaggcactgcaggagcagagcccccaggagggcctggcccaccacattgtactgggaaggagctcagagccagagatgcaggaatgctggcgtcctgtggacaaggtggaagagcttccttctaatcacctctgtttcttcaaaggaataggcctgacagctggtcagcagcaagtggacagcgaggccgagctgatggagggttttgttgttgttacttttgttcagagtataacacgtatgcagaaagtgcacatgtcatgagtggacagaggataaaccgctaccccactggggggcgagcagaggggagaggcctgggcctgcaccatcccctggtggccggaaggctgggccctcagaactggaggagattggaggaggaggaggaggaagaggaagggaaggaggaggaagaggaagggaaggaggaggaagaggaagggaaggaggagaggtgggcagcactgagggctcctgcgaatttccattcacaagtttcccaggcccctggcagcacggctgtgcttttctctggctgcggtgagtggcccgcgtggcagggcaggggaagagcgctggagatggtcgtgtgtgtttacgagattctctctccctgcccaagtcacggcagtggcggaaacttacccaccctttggatttgggctgagccgtggtttgcttcaccccttgggacacacagcagaagggagtgtgcctgtttgcagctgagacctcagggacagcggccctgacctcaacctgcagcccggggcccagccctgcagagcccggcaggggaagaacaaaatgccctttgctgggagccaccgggactggggctgtttgcaggctgggttacgtgtgagagtgaagttttgtctgagtgtgttggtgggagacggcacagacgggaggctgagctgcgtttgtttgcagggatctgcgctgggtggggcgggaaggatgggcagcaggcggcagggacagtgaaaagctggtgggtccatggacaggcagcgtcactggagagaaagaactgccgatggagagttctagaataaggagctggagcatccgaggggctgaagggctggcactatagcaacaatgccctttgggtatgagaggaggggaggatttgtgtaggtcggtggccaagatcgttctgaggggagggttcctgagcccaggcgtccaggaggagcttggatctttaatttctttcagtggtgttttgggatttggggtatgtaagtctcacacttctttggttacatttattccttttgacttgaggggcgagtctgctggcccaggaatgcaggcggtccgtgtctcaggttggctgcacgtcttccagcaacgctgtgtcattttccgagagtaacgtgtgcactcactcactttcacgccatctctccactctgcatttgggcaagcagagttcctgctccccgttctgcgtgtctgccccacccccacacccccacatcccaccttcagttactaatactgtatcttttctttttctttttctttttttttttttttttttttgagacggagtctcaccctatcacccaggccagagtgctgtggtgtgatattggctcactgcaacctccgcctcccgggttcaagcgattctcctgcttcagcctcccgagtagttgggattacaagcatgcgccaccacgcccagctaattttgtattttttaatggagacagggtttctccatgttggtcaggcttgtctcgaattcccaacctcaggtgatccacccgcctcagcctcccaaagtgctgggattataggcgtgagccaccgcacccagcctgtatctttcatttttctagagacagggtctcgctctgtctcccaggctggagtgcagtggtgcattcatggcgccctgcaggcttgacctcctgggctcaagtgattctcctgcctcagcctcccaagtagctgggagcacaggtgtgagccaccacacccggctacagttactaatgctattgctaccgacaacggcaacaactgactgccatgcactgattgcggatgtgccaggccctgctctgggagcttcacctgtgttacctgacaggatcttcctaacactgaaggaggggcacgacctgaccatccctttacagaagagaaagacgagtgtgcaggaacagggagcagagctgggtgagaccaggcggcgggactcctgggcccactcttacccatgggactttgtggtcctcccacgacgccaatcagccccagtttgaaccacgtgaaattgctgaaatgtgaccttttgacccacaaaaaaatggcaatttcctatgattcaactttttttttttttttgagacggagtctcactctgtcgcccaggctggagtgcagtggtgcaatcttggctcactgcaacctccgtctcccgggttcaagctattctcctgcctcagcctcctaagtagctgggattacaggtgcgttccaccgtgcctggctaatttttgtatttttagtagagatggggtttcaccatgttggccaggctggtctttttttttttggagatggagtcttgctctgttactcaggctggagtgcaggggcgtgatctcagctcactgcaagctccgcctcccgggttcacgccattctcctgcctcagcctcctgagtagctgggactacaggcgcctgccaccacgcccggctaattttttgtatttttagtagagacggggtttcaccgtgttagccaggctggtcttgaactcctgacctcaggtgatccacccacctcggcctcccaaagtgctaggattataggtgtgagccatcgcacccggctgattcaacttatttttatttatttattttttgagacggaatctcgctctgtcacccaggctggagtgcagtggtgcaatctcggctcactgcaaccttcatcccccaggttcaagcgattctcctgcctcagcctccctgggattacaggcacccaccacacctggctaattgttgtgtttttcgtagagacagcgttttgccatgttggccaggctggtgacaaactcctgacctcaggtgatctgcccacctcagcctcccaaagtgctgggattacaggcgtgagccaccgtgcccctggctgattcaacttatttttaaaaaaagacctgggatttgaggaggtgcctgaatagttggaggtaggcgttttccaaatcgagtttggctgcgtggggtggaatgtaggctccaaggatgccccgctgtgtgaacaggccagctgctcctggaatgctgctgagagggaggtgccctgttgagggggagtcccaggggggtgaggggctggcttccttgctgagagccacaccatgccatctaacaagtcagctggaacccctggcaagatggccgaggctgggtggtgacctcacttgctgggttgctgggcccaggcccggctctctcctgaaagctccacagacctgcagactcagtttccaggcctgtcctgctgcccccggagcacgggcatgggaagacagccatctgggcggtctcgggactgtttggttgagaaggttctgtcacatatgacgtgctagaaagaaaagaccttggactttaatttctttgggcgttagagaggagaaggcgatttcagctttagaccatgttttctcttaggagcctggcggtgggaggggagcccggccatgggaggggagtcatattttccagactgtgcggcttcaggccaccatgggtctcagctgatctcttacaaagcgcttgggagctcccgagaccggggaggcggcgcggcgtgtcagccttggctgccgggtggcgcttgagttaacctgattattgcatggatctcactggttcaaaaccttcctggggaagaagccaactgtccgtggaaccaggaggagcctgaggggtggcagtgggcactaaggaagtggcctcggggtgcgggaggacagccttggcatggttgatgccttgcccagcccactctgggtgagggaacacgggaacagtgtcatgtttccatgaggggccactcctggcttctctcctcacccccccaccccccatccttccctggagaggagtgtgacctgtctgaccgcgtcatgccgaggcttcggcactgacttgtgcagatgcctgcactgcagggcgctgatctgtttaaatggcgcgagccctggggactcactccctccctacccccaagcaggcacagggccagcgtccctgcatgctgtgtgggcccaagctgacccgcaggtgggcagtcccgggtcagaccatggacagggatggccttacaagttctctgggccttaaaatctagattcatgttctccaatctgctttgtcagaaataaagttgataaggcaaaaaaagtctactcaggtgaaaaccctcagaggcatccttgaattctctctcacagcccacactggacgcaacagcaaatcccataggctctttttttcttgagtcaggtcttgctccgttgcccaggctggagtgcagtggtgcagtcctggctcactgcagcctcaaccttctgggctcaagtgaccctcccacctcgggctcccgagcagctaggaccacaggcatgtgccactgtacctggctggtttttaaatactttttgtagagatagggtttcaccatgttgcccaggctgctcttgaactcctgggctgatccacttccctaggcctcccaaagtgctgggattgcaggcatgagccactgtgcccggcccctgtagactcctgttcattcaaaatataccccaggcacaaggacgtgcaaaagacccacgagcagaagggaatccaagaacagacccatctgcacacggtgacgggactaccacagagggagccgcgtcctgcagggaaaggtggtggttgtttttacaataaatgctgctggagcaattggatatccatgtaggaaagcgctgatttcacaccgacacggaacatggctgcatgcgtggctcacgcctgtaatcccagcactctgggaggccaaggccggtggatcacttgaagccaggagtttgagaccagcctggcaacatgtgaaaccctgtttatattaaaaaaaaaaaaaattagatgggcatggtggcttgcacctatattctcagctacatgggaggctgaggtgggagaatcacttgagcccaggagtttgaggctatagtgagctataattatgccactgcactccagcctgggtgacaaagtgagaccctgtctcaacaatgacaacaacaaaaggaagacaaatcctagagctaaatgtgaaagtgaacatattaaagcttatgacgggggctgggcacagtggcttacacctgtaatcccagcactttgggaggccaacgtgggagggtggcttgagcccaagagtttgagacaagcctgagcaatatggtgaatccctgtttctacaaaaaaaaaaaaaaaaaaaaatcaaaaaattagccagtcgtggtggtgcacacctgtagttccagctacttggaaggctgaggtgggcggatcgcttgagtccaggagatggagcctgcagtgagctgagatcacacccactgcactccagcctgggcgacacagccagaccttgtctcaaaaacaagctaacaggctgggcgcagtggctcatgcctgtaatctcagcactttggtgggctgaggcagacagatcacttgaggtcaggagttcgagcaactcaggaggctgaggcaggagaatcgcttgaactcaggaggcagaggttgcagtgagctgagatcacaccactgtactccagcctgggcgacagagtgataatccttctcaaaaaaaaacaaaacacgcacacgcacacacacacacacacaagcggccaggcaccatagctcatacctgtaatcccagcactctgggaggccaaggcgggtggatcacctgaggtcaggagttcaagaccagcctggccaatatggtgaaactctgtctctactaaaaatacaaaaattagccagacgtggtggtatgtgcctgtaatctcagatacttgggaggctgagacaggagaattgcttgaacctgggaggcggaggttgcagtgagccaagatcgcaccattgcactccagcctgggcaacaagaatgaaactccatctcaaaaacagaacaaaacaaaacaaaacaaaaagcaaacaggctggggatgggggctcacgcctataatcccagcactttgggaggttgaggcaggtggatcgcttgaggtcagcagtttgagaccagcctggccaacatggtgaaaccccatctctactaaaaatacaaaaattacccgggtgtggtggcgggcgcctgtggtacttgggaggctgaggcaggggaattgcctgaacccaggaggtggaggttgtagtgagctgagattgtgccactgcactccagcctgggcgacagagtgagtcttcatctcaaaaaaaaccaaccaaacaaacaaacacacacacacaatatatatatatataaggcttacaacaaagacagagaatatcagcaggaacttagggaggcgagaagtatcttacatggaacacaaaaagcaccgtgtacagacgaaagatgggtaaatcaacttagttgaattctaagaacaggctttcatcaagacaccatttagagagagaaaaggcaaaccacagactgggagaaaatatttgcaacgcacgtcaacaaaagattcatctccaccgtatataaaaaacatctagaaataaataagaaaatgacaaactactcaatttttttatttttatttttttttgagacagagtttcacttttgtcacccaggctggagtgcaatgggcgtgatctcggctcactgcaacctctgcctcccaggttcaagtgattctcctgtttcagcctcctgagtagctgggattacaggtgcctgacaaccaggcccggttaatttttgtatttttagtaaagacggggtttcaccacgttggtcaggctggtctcgaactcctgacctcaggtgatccacccacctcggcctcccaaagtgctgggattacaggcgtgagccactgtgcccagcctcgatattttaaaataggcaaaagacttaaacccggcttcacagagagacatgcaaatgttaacagcaggaaaaagtgccggcctcattagtcatcagaaatacgaaaatgaaaaccacagtcacccatcactgcaccccaccagaacggcttacaaaccaagcggagaggaccaccccaagcccatcacagtccaagccgccctctgctcttgcctggacagtcctgtctgtgtgcttctcctctgcactcctgcccggcctgcagtctgtcccccacactgcagtgagaaactgctttaagcatataaattagagctctttatgctcctgttcaaacccttcccacgactcagcttagggattccagggacaagccacgtgtggtcactcagacctgtactcccagcactttgggaggccgaggcgggaggatggcttcagcccaggagtttgaagccagcttgggcaacatgatgagaccctgtttctagggaaaaaaaagattccaggtccttcccatggcccatgaggccctgtgagagctctccctggcgtcctccccaaccttttcctgatctcttcccagcacacgtcttcaacacctggggaaggatgcccagggtccctccctctggggccccccagtactcagtcctgagtgactgtgggcctggtttcacccagtggcatgtgcagcttgcaggtcattctggtcaggggccagagcgccagcaagaagtctctctctctctcatcacccctctctctccctccctccctgtaagctggcagcattttgggtgggggctgccctgtcagcctggcccccatgaagacagctctgagctgcaggaccgatggcaggcatgtaggtgagcgggacatgagtcctgggatttcagggctgttgtgacctggtgctagtctttcctgacaaccccagtgtgttcctggttcctgccgcaggaaatctgccctcactgctccacgcgccaggacgtgccctcctcctcctctttccgcacctatctcctggctgcggctgctcacttgtacctgcaccattacttactgctgtattctttgctttttccagactgatgcacccaccagctgcaaatcttaggccagctacacccaacacagttgaatattgtggacaagctgtgccagacaaaatcatacatgatttcacttctaaaagcaggcaaaactgtcatgtttagtgaaccatatgtagtttgtaaaatagtaaaagcaaaacaaaatgattattgcaaacgtcaagatagttgtttcttttagggggaggaagaattttatggccggggagggctggcctggatgctggctttgtgttgcttcttgaccacgatgatcaccttgcaattgtcttttaaaccaggtttagctttgaggtactttgctgtatgtatcatacatctaattaaaaatataacagacatggaagccagctaagagatgcaacgtaagcgtaactgggggaaccataagaaacaatgttggctgggcacagcggctcacgcctgcaatcctagcactttgggaggctgaggtgggtgggtcacctgaggtcaggggttcgagaccagcctggccaacatggcgaaaaatacaaaaatgagtcgggcgtggtggtgtgtactcgtggtcccagctattcaggaggccgaggcgcaagaatcacttgaactggagaggcagaggttatagtgagctgagatcgtgccactgcactccagcctgggtgacaaagtgagactctgtctcaaaaaataaaagaaacaacgtaagaaaacttagaacagatgaagtatttgatagcattcatccttgacttcctggattgaatcacacccactactggcagatttaccttaacacgctgctggactgtttgctaatattggatgtgggggttttgcatccatattcagaactgggaggcccctgtagttttgtgggccattttgatcagtatcacactcagttcatagaatttggaagctgacctttttttcaggttggaaaaataagtgatgccaacttgggcctatgagaccgagatgctgggtgtctgtcatggcctgcatcggccatctcgctattcgcctaatgttatgtggaacccacacggcacagaccagagctcagcagggcaaggccactggacctaattacagaagccaacacatctttttttttttttttttgagacggagtctcactttatcagccaggctggagtgcagtggcacaatcttggctcactgtaacctctgcctcctgggttcaagcgattctcctgcctcagcctcccgagtagctgagactacaggcatgtgccaccacactcggctaatttttttttgtatttttagtagagacagtgtttcatcatgttggccaggatggtctcaatctcctgacctcgtgatccgcccgccttggcctcccaaaatgctgcaattacaggcgtgagccaccacgcccggcccaacacatcttctcgttgttggagctagtttgttagattgtctgtcacctgcagcgaacagcacactgggacagcctggtccacttagggtctctgaagcggttccctcttctgcagagcgagacgctcctatttctcaagagcttgtgtgggtcaactgggataaagagctaaagaggtcccttttcttcctgctttgtcccatgtcaaccacaactccccttgctggtgtctggattttcagggcaggtaaaatttaccttccatgcccccacaacctggttcagctttgctatttccaaagcccttgagattctaaccccgccatccccctggacctctcacttctcaggctgctcatctggaccgaagggagctctgggaacagagcggtggttcctaggaagtgctgcttcgatttgagccccgcttctccagggcagaggcacagcattcgccaggcaggcactgtgtcttgctcaccccgtggtgtgcatgcatgtcccagcgtcctggcggtgctggccactgggtggctgcgaacccctggagcctgggaaacatgaaataacaagccactgcagggagcgtcataacacggaacacgctcgacggctgtcctctcctgggtcccctgcgttaggcatgcaaacttgggtgcgcagggtaaagcatgtgggctttattactgcattccctactgtcatgtatgtttagatatttccaaaatagaacttttatttcatgaaatgatggtgaaacttgagagcaagctaaaaagtcccacttggcaaattaaaagttagaaatcttatgttgatcccgtctttggtaaaatttaggtggaatgtgaaattcacggtctgggaataaagtgctttttagggccatccatagccacgtcccgcatggcttgttagtgttctgagactcaaagtcttaccttccatcgcacaggatcgagaatcagattttataattctattcttcctctgtgctttgaattgagactttttccagaaatcattcttaggtttattcccttttggtaaattctagttcaatcctgaactagaaaagaggcagtgaccaccatcacccctttagacactgccgtgggcacaccaccaataccttccccatactcagttcatttgaaggcaacagattttctccaattagcagggcaatgaccccattaatcatggtttcagaaatatttaaaatgatccttatctacttacaagcacatgcatatggtaagcttgttagtcctcctgactcaacagcaagcaaaagaatgctgcagggaggccaggcatggtggctcacacctgtaatccccgaactttgggaggccgaggcaggtggattgcctgagctcagcagttcgagaccagcctgggcaacgtggtgaaatcccacctctactaaaatacaaaaaattagccgggcctggcggcgtgtgcctgtaatcccagctactcaggaggttgaggcatataatcgcttgaacctgggaggcggaagttgcagtgagccgagattgtgccactgcactccagcctaggcgacagagcaagactccgtctcttaaaaaaaaattgctgcagggagcacacagtaacttagataattcaacaccactgttgaatcagatgtgctgataccgtatttaaagtttattctggcagctgtttgccatttggttttatatctcagcaaacgtcatataatattcacgtaagaaacaatttacagtggtatttggacctgaattcattataaatcaaaattatttcaagtggcttttatattcttcctttttaaaaacaatctgcctggccctagcacctgtataaaagcttaactctatctgccactggtggaccgcctggactcatttcactgggctgctctttctcaaccatgatccacgcacaccagaggggcagcagtgcctcatgggcactcagggtcatgctcaccttcccacctcaaccgcatcatagacccacactggggtgggggagtggggaccagggtgacaggcttcctgtgtgactgtgagctcctcttactacaatgtctgaagacactttttatggcattttgattcacattttatcatttactggttttttttttgggacagggtctcactctgttgcccaggctggagtacagtggcaatcacacctcactgcagcctcggcttaccaggcttgggtgggtcctcccatctcagcctcccgagtagctgagaccacaggcatgtgccaccacacccagctaattttttgattttttgttgagatgggggtctatgtttgctgctcaggcaggtcttgaactcctagactcaagtgatcctcctgcctcagcctctcaaagtcatgtatattttaaataagctttctgattcttagcggttaagaaatataaagtacaacttttgccatcttccctccttcagactgagtggaaattaataaatggccatcactgaccaaagttaaggtaaaagaaaaaaaaagtttgtactttttttggaaacatgtcgagtataaggacataaacgaaacggcccacatcgccaaacactgccactaacccatctaaaattaccatttgcccaccacccacatcaccaaacactgccactaacccatctaaaattaccatttgcccaccacccacatcaccaaacactgccactaacccatctaaaatttctgcccaccacccacatcgccaaacactgccaccaacccatctaaaattatctgcccactactatagtatacaaacctatttttttctaagagacaaggtctcactgtgttgcccaggctggagtgcagtggcatgatcatagctcacttcagcctcccaggtgaatcgacaccatcaccttcttgaacttcatcacatacaaatgggctttcatgagatggtcaagtagtatgtcctgccaatcttcactgggtgtgtagttagggcccagccactcccctactccaccagcagggtctgtcactgagcccccacaaggagcagagcagggcaggagagcctgggtgactcccacctagagccaggaggtttttgaggatgaggtatgtggacacgtgggcatggtttgggatggcctcacttggaacgttttggtcttaggaatgaaatgctcagcccccagcactgacttgtggcaggtgccccagaccggtcagctggctgtcaccatagtcacaccaccagcacgcgccacccgagtagcttggggaaagtaataccagagtgtctaaaggcggatctgcaccgcaggcttctgtgtctcccacagccattggcataaggaaacacggacacggactactggccctcagtgtgccgtgtgagcatccacgctccctcccacgaacacatggggttcttgacacaaactcgcaggaacgagaaggtaacatgggtcgggcccacccactgtgtctcaccacagatcagccttcttcccaacatcagtgcagtctacagcgtgtctactgattatagctaagcacttcttcactaaccagttagaaaagaaaccccaaaaggctttccatgacagcctcgagaaattccggattatttagcatgtagatctcacctggtatgtgttttatttcatgccctaagataaaaaatattatttcatttatactcaaagtggtggatggatattaatctttacctccaagatgactagcagatttataaagaaaaagaaatttaaagaacttccacaagaaataagttacaccaagaatactgttatcactacaaattttattcagaaacccatctttgtatgtttttttttttgttgttttttaaaaaaaattccccttatgaactggtttggtcaatcaactacaacactttctagcagacataaggtaaaaatggcatggctcagaatcgcccagatctttcacgatctctcgaccgcctcctgtcacgctcccgtccgccgccacctccaccaccgccaccgccaccgccacgaccacggtctctagaccgagaacgacgctcccgggatcgggatcttgatctatgcctgcaaccaaggaaaataaagaaaaccgtgccatccaaaccacggcacgcagcacagaaccacacccactctctcaacacgcgcagctcctcaagccaacggcactgataaggaaaaacactgctgaagagactgcacgccgtgactgagacacaccctgatttcaggtgtgaaaagtttcaggagaaaaaaatgtgcaacttagaagtgaacaggtgtaataccttgcatcttctgtcttcttctagaaccaactcaaatggtcacaggaaatcataatcaaaatgagctggacacataccatcttcaaccctcactgaccccacgcttcaggcgctcatagctactgtgtccatcaggtttttgggctggggagagcaggcctgtttttctcttatgcttcttgaatgctgacaataaaacaatcgccacccatctatttactagtccatgtttaacagaagagggatgagaacctctccagactcagaactcaatcggttcgattctgacgtcttgattttctctgctctgtgacctgtcgtacatttaaatgtaggatcagagagatgtgaccgctgggcctgattctgccagtgtcccgaagggaggatgccagcgatcccaagacataatgaaatgccctaaaaccaacaagcaaaaccaaaagaaaccccagtggacatgtgaaatatgtaaagcaaaagcttgtccaacctgcagcccaacacaaattcatcaacttgcttaaaacattatgagattttttttgcaattaaaaaaaaagttatcagctatcattagtgtattttatttgtgacccaagacaattcttcttccaatgtgtcccagggaagccatccctgatctaaaggaggttacaacatctattcttcttcttcgtaatatctgggagaataaactgcatgcccactttcaccacgagcctcatgtccgcggctgcccagctaaccgccctcttgcttgattactaagatctgatctctacttgagaagttggataatgaagttacctgtgtgcaggtgaatattcttctccaaagaggacatttggatatttaaaaatatgtactatgttctaagcactgccttttaaaaaacagaaacaacacctatgccaaaattttttttttggaagggggagggttgtgaggggagaaagaagccactgagcttaacaacgggcacaggaatactcacttcttgcgacggcggccatacagctcccgccgcagctctctggaaatgggcttcaaatgcatgaagttgcagaagccgcctcgtgtgcattctctgtgggtgggttggaaggagacatttactacctcgtgtgcacacggccccgaactgtgctcagtcacgtcactggccactcctcactcaccccatctcatactgacggcagcaggcttctctgaagtccgtcacgggtgacagctcggcgtggatcggctgtccattaaaccaacggttattcaagtcaatcacagccttttccgcatcttcctcacggcgaaactgaaaagacaaaaacagaagtgcttgccatccacgctttaataagactttctcaattaccaatccaagtatgtatcagagagagatatacacactcaggtatagtaaggtggaatagtattacaggataattgaaaaatcctttattttcaatgagattaacttcaagatagtccaagattttgccaaatgttgccttcatttttcaaattcaactggttaaaggagcaaatatggctgtgtaggcaaataaagttttattcactaaaaaagaaaaaagaaaccaaacatgtgagtaaacctaacttttccttagtccacacagcttctaaaccaacaggtactaaatattctacactgaaataacgatggctgtggtgtacggtccgtccttcagttctgctggctgggcgcacgtgtgggctggccaccgccacatatgacgcagccggtaggcgccgagccagtgcacctgagccctgctgtgcgcctgagcatccaggatctcaaggtgcatggcgacaggcaccccatcctctgtcggccttggccccggcacactaagcggctgcaccactgtctcgctttcgcctgttggccttggccccggcacactaagcggccacgccgccgtctcgccctggctcctaccttgacgtacacgttccccaccaggtggtctcccaggttgtcacagacgttcatctcctctacttccccatacttctcctccatttctgtaaaaacctcctgaagggagaccacagtggtttaagactcgttatacactacaaagtgtcattagatataactcatgtatgtttattagcagagaaacattttaaatccttccaaacagatacagaagatcaacaggtctatcagtcacagagttcagttctctcacctcaaaaaactcatcatagtgttcctgcatctccacatcgctcacggcacctgcaaacaacagaaatcttgctggttagaacatgttaaccgagtgaactcttgtgtttaaactcaaactgctacagtaacacacacgagattatctagagaaaagcctggcagagctgcactctgcaggagcactcaggagactgagccacatggctacttgtgaatggtgtcaagtgtggtgagattttaaatgtccccatgacagtctcgattctggctactaaggtgttaaaatcacaaccagctttaatcagcatcaaaagggccacattttcagaaactgtgaggaaaaagttgactctcaaactacaaattttttttttacacccacaagatgcagtctggctctgtcgcccaggctggagtgcagtggcaccatctcagctcactgcaacctccacctctggggttcaagcgattctcctgtctcagcctctggagttgctgggactacaggcgactgccaccacgcccggctaatttttttttttttttttaatttttagtacagacagggtttcaccacgttggcaggctggtcttgaactcctgacctcaagtgatccgcctgccttggcctcccaaagtgctgtgattacaggcgtgagacaccgcacctgggctcaaactaagaaatattaaaattttcttccttttaagatttagagtaaaggccaaataagcacactgatgtcttcccctcttctataagtttaaaatgaaacctgaaagcagggtcgatgattaaaagctgatgttcctaactagtcttttatggactgccagccatggtatgctctcaaattcttctgatgtgattaaaatccaagcaaccatgaagattcagtaggacagttcacgcaaccttacggtattgtggacgccctcaagtaaagggaatgttacaatgttttgctgatgaaagcattcttttttttttcttttttttgagacggagtctcactctgtcgcccaggctggagtgcggtggcgcaatctcggctcactgcaacctccgcttcctgggctcatgcgattctctgcctcagcctcctgagtagctgggattacaggcgcccacaaccacgcccggctaatttttgtatttttaatagagatggggtttcaccatcttggccaggctagtcttgaactcctgacctcgtgatccacctgcctcggcctcccaaagtgctgggattacaggtgtgagccaccgtgcccggcgcaagtattcttaagttttatattcccaaactattttcatcagtttattcttcataattcacatgtattaggtaaaatcatgtctgttgcgtgggtaaatttggcaaatttacactctatccccatcatcattctatcaaatttaattaatttttttttcttttgagatggagtctctgtccactccaggctggagtgcagtggcgtgatcttggctcactgcaacctccacttcctaggttcaagcaattctccttcctcagcctcccaagtaggtgggactacaggcgcgcaccaccatgcctggctaatttttgtatttttagtagagacggggtttcaccatgttggccaggctggtctcaacctcctgacctcacgtgatctgcttacctcagcctcccaaagtgctgagattacaggcatgagccactgcccccggcccactctatcaaattctagagttctctaaacctgagaaatcacagagctggtgtatcaacaaacatgttccaatcagctagattaggggctggcaaaagcctgactggtttccagattgggccggctgccttagcctgtgcacccaacgtgggcatctgactgctggcacacgggtctttgagcttgctcaaaactctttttatctttttttttttttttttttgagacagcgtctcactgtctccaggctggagtgcaatggcgtgatcttggctaatttttgtagttttagtagagacggggttccaccatgttggccaggatggtctcaatctctcgacctcgtgatccacttgcctcggctttccaaagtgctgggattacaggtgtgagccaccgtgcccggccccctttttatctttgaagataaaaaataacttcttattttctaattctgagaatgatttaagttcactttctaacctatccggggctgttttaattatttttgaacttccaggaatctgctttcgaacccaaattttattaagtgtaactactcggacagcctgccaatcatatcacaggatatcccaattggaaagctattgggaatgtaccttcctccccgagtagaaatcaagttataaacggccaaagtagcctattccaaagggcagattttaatatttcaaattcacttccttcccacataagaagaatgtgaagaggagaaaattattcacatgctcaaagttttagcaggtttgagaaatggttttggggtgattattttaaattattggctatatttgttctgcttaaaatgtttcaatcaaagtgacttgaaaggcagagacaactgcattaagatacaattaaaaacttatttgtgactcagcctatgttaaatactacaacttggaaaataaagcagttttcttacagaaatatcattcttaaactgggattgatagttaactttaacccacgcatttgaagcttatttttttacatactaaagggtatgttgaaaagagccagtaattttaggtaattgatttcttcctaaaatgacgaattagaatttcatctaatttgtacaatctggactccagaattggaatataacgtaattgctaaacttttagtttgtagcatatggaaaacaaaagtgctgtgaactgcaaataaagacacaatgaaaactaatacaacattctattgtcagtcaagaaagcatatacagtccccaaataaacgatcagggcaaagaattaattactgttactcagtcatgtacttccattcacttttatcccagggcagggttgttaacaaaaattatttaataagtgcatatagaaacaatttccctccgcctattgatcttatttccttaaaaaacaaaagaaaacaaacaaacaaaaaaacaggtattttaaaccaagggttaccaagtaaatcctgctaccatccgactcagggaaagaaatctctactatcaggtcagtattagcactgaaaagcatttagtgtcttggcaggaaaagttgacaagaaaatctcatccacacatagaaatgtgcaccactgtgcaaggaagcacaatccccaggccacccagtgcagggccagctcgagaggggaatgccccctgggatcagctaccccatgtcggtcaccccattaactgaggggctctggttcaagggtgtactcaatttaggcttgtggatatccaagggcacctcaatttttactgctttaaaacagaatggtgaatgggaagtgcctatctttggtttggactttctgattttaacaagagtccaggtgttcattttaatttatccataaatgactaaattctaatgattctatagttggatggctgtaaaaatcaaattttagttttctgaacttcccaatcatactcatctatgatatctccttctctaaaaattatcattaggtaaatattcacaatctaaatttagtatttcccagtacaggaagatattggtaccatctactgaatgcccagttttgatctatttctaaatggagcaaaccaattccatctcctagagctggagactgtatccaggcagtgtgtggacagaacggacaatcttttctgccaagggcctatttgagtggagcacccccacacgggttagacgggtcggcacggggctggtgggtgaggaactcaggggtcagtgcaagctgcagaccctcatttggggaacgctctcagcacaatgctcttacaactacagggtgcactccaaaatggagttcaaggaaaaaaggctaatgagaaataaaatctgaaaaaataacttaaaaagtttgctttttaaaaattccagaaagtgagagaaacattcaaattttgttgctctaagagggaagaatatgactcgacgtttaattccagtacattccctctaggatgacggccaaagtaaaggaagaaggggcagcagcagctccagactggttttttttttttttttttttttttggagacggagtctcactctgtcgcccaggctggagtgcagcggcacgatctcagttcactgcaacctccgcctcccgggttcaagcgattctctgcctcagcctccctagaagctgggattgcaggcatctgccaccacgcccagctaatttttgtatctttagtagagatggggtttcaccatgttggccagattggtcttgaactcctgacctcatgatccacccgcctcggcctcccaaagtgctgggattacaggcgtgagccaccgcgcccggcccagctctagactgttttaaagggcaccctttccagttactttttcccttttaacacacggtgggagttcaaatctccaaaagaggtttccatggggtcagtgggacgaaagctccttgccacctctagtgaaacgcggtccttgacactagcacggcagaccagatggagtggacactgagctctgacacgcaagcccagggaaccggggaaggaacttgtatgaacttacagcgcaaaccgtcagcagactgggaagagttttgagggttacggtaaatgttcaagagggcaatggtctgaaatacaaaacgcaacaactttatattatggaaaattaaaggtaaacacttaaccggctgcctctggcaagtgcttcagttgagattcagtgctgaaaagagagcaagttattttctggagaagcagaggcgttttctcagttggcggctgccttgaatccctaacactgcggtgtaacggaggtctcatgatatgcccatcttgtacttctgcttacagaacgtgaaaactctccttttcaaaattccaattcaggtaaaagcacaaatagtttgccaggctagcaccaaaatgttcttagatgtggcagaaaatttttaatgaactcggaaagaataatgcttacataaactgatggaaaaaattactgtattagagaaatacaattgttacatatcatgaaatctccacttcctggaggaaaaattataatggtgaaataaaacccacacttactgggcaacttaccttattgattccttaatattcctaagagttttaattttacacaaagaacttaataaaggccaggggttcagtcactgtaaagaccaatgaatggctcaaaatgttgaaatccgtttcacatggacggacctgctctcatgacaaatgtcaatcaatggaggtggccgggccagtgaccctccctagaagggataagcctcctgaacgtggccaagtatcaagttcttgctgtgtgcgccaaggagttccagcaccttgtcctgtttgcaacagctctatgtcagcagctcagaagccaacattatttgtctcaattaagagtgggctctttaacaccattgttttaaaaaaatttctccaactgtgggacttacagtgtgagccgtcagccgtctgtgcactgttttggggattacgatagatgttttgaatcaagatggtctgcggggaaaaaaaaataaaaaggggaattctactggctgctgtgcatatattagacaattgcaaagagacaatttgtttgcaaatggctaaacgtttgtttttttcccgcaagtcagacatttgtcttctgaagagtacaccaaaaccatcatattatgaaaacagagtttgagcagtgacttgggtcaagtcagccagcaaccaagaagaaactgtattgttttgattagtcccacgttttcaatgttaaagtgttttaatgcaagataaatagtagaatactaatattttcttgtacttcaagctagcagacaccaagatgtggaaaaattcacgttataatcatattcctcacacaagataatttttcaaaaccaaatgcgtaactcagctgtctgcagtacatcaagttctctggtctcctagcaaaacaggcacaccaaacaggtctgtcaactgtcatggacacccggctctgatttacactttcttggtgggatctctgtttacataatacaatagcttaaaacatttgctcttttccgatccttcttttaaggaaaaaaaatccttttagcccttgtgctttaaactggatcaggcagacttgaaaccttacactgtaccgttcttcttaaaatcaagttgtctgaaaaaacaaaccatgtttaagttagtaggctaatatattacatgaatcttaacgtccatatcactgtaagcagcttataaagaaacccaccctgaattatgctagagatttacaagctaaagcaatcactcgcatgatttagaaaaataaatgtttagtctcaacaatatccacgtgaagcagttttgtaagtggtggttttataaaaccagccagctccatttctagctctgtttaaaggggagtggttgtatgaagagttcctcagtcaaaggtgtgcagctgggaagcccaccccacctaagagggaggtctgacaaactgtccacactgaaccactcagacctgcatcagggccccgtttcttccataagccgccaagtacagccctgagtcaactgaactcaggcctgggaggcttcccaaagctgacttgactcagctttgaactgaaatgaccgtaccatgacaaccctgatgaaaagctaaactgagcccaattattcaacagtaaaattcagttggtctcactcaggtattctggcagtggctatttaatgaaggaagcttaacgtaaagaggcaatgcagtctaatgggaaagccaagggtggctaggattgcctaaaaccaaccaaaacaaacccacgcatcaaactaggatgcttaagctgacacatactactgaccccatcgagctccaatgggctctccccagcactgacctggaatgcctaaattaacttcacatttcacattctcaggtaatctatgatccagaaaaacataaagaaagtgcctccagccagattaaagaaaacttttagaatagggaacagttgatttctctcagcccaacacttgggacaccccccaaaatcaaagaactgggtggtcacttaagatgcttggttataccacaatccatggccactggtttagttaggggagattcggttcataaatcaaaacattaaagaaaaaacaattgcaatacacagaaaatgtaaagctagttctccaagattttgaaatttgtaaaaagaaactcatgttcagagctatcaaaagacagactgctattatactaaccacttggtaattagcataatggagggaaaagccatcatcctcttcccttctaaaaacactgtgtgctgtggggtcgtccatgggcttcaaccggaaaaaacccatgtttccttctcccagctcacttacacaaagtggtagattttcttaaatgcttacaggaaaacgtatacagacagatgtgagctcaaaggcagagcctggcagctcccagggaccacgcataatagctactcaacagctcagaggctgcacatttagacttcaagggtgggttggaaggagttccccagccctccatctggaaagacttgggcatcgattttcaaatttcaaatgttctcatcaacgtgggcacaagttttctgctccgattagaggtgccttctccctttaatccgtaagtgatcctttatagtgtaccaacctttgccttttcttcaactaaccaaaaataaaactatcaaaactcacaacttttgattgaactgaactcagagcggatctaagcccaagataacaggcactcctcaattaaccaaacagacccgctaagagcaatttacggcccattttctacctttcagcttaatttttcatgtttccatgacgtgatgcgactcgctgtttcctcagctagggatgtgaaagtgaggacgcagccagagaagctcgagcagcatgatgggcctggtgacaatcacgctaacttggaagatggctccatcacctctactgtctggagacagcaaagagcagaaagcccactccgtgtccactggtgcctggaggaggctaacccaaggctggcacggccaccccctctggacccatgtctatcagagggggtagggaagatggcagggcagcaaatatcaggcacagccaacacacaaacatcaaaaactgatttttaaagtttctctaatgataaaaacaaggagtggtggtctcagaccttccactggaagtcgatcacctgcctcactattatttaaataaaagaacacacttatgaacacaaatggaaaatacaactacgagagaaaaaatgacttgcttaatatgtagaaattaactgtctttgaaaagaacatgaagtttttataatttacatgaaaaaaaggcaaacaaacctggctaaacgtcggtttattgtgcaaccgagagcacctgtctccatgacgacatgctccaattttgaaataaaatgaacagttgactctgtaagggaaaatgagagctgattattttgctgggaagatatcaaacacatggaatatgtcagcagcatgacatacactatcaaattacttttaacctcacagaaacatgacacagacttttttccgtggtattaagcacctcctcttccttgctgtattttaggacaacgtaacttcaacttccctttctgcaaacacactacttgttcagcaaagacggttctaactctaacccgcctcctcctcattcaaatcccctccactttcctaactgcacagctgttctgtttgtttcttaaatggagtattaaattagtctaaaactaaatgtaacttaggcagtatctgttctccagttctccacgaccaagttctctcttgaaaagaccggtgtggtgagggttaagatcccaactctgctaccagctgcttgggcttgggcaagtcaccctagctctcagatgtcatctgtaaatgatgacaatgccaatgtggcactgttctgagagtcagacagaacgtatgtgtgcttcacatatggtgctcatgaagtgctatcattatctaaggaaaacagaaaacgaagttcagagtctctctaaacgcatgacaccagaccaacagggagtttcaaaaaataggtctgaagtaaatcaattctcctggtctcaatacactgaaaacaaactattaggggactgaccaaacccaccttaggaaccaccttacgtcaccttctgtctctactgcaaaaccctcccttaatactgttcaaatacgctgacaatccagatccatatccaatggaaccagcaatcatgcctgtgtgccagcaatgtcagggagggaagccgatctctgatgaattaggacatcttaccagacagactttgttcaaaattcaatttttttttaaccaagtgccattatgttttaaacagtcaatccagagttaagattgaagggcctcaacctcagtgaaatctgatggaccatgaagactgactagccactgatttattatcaggtagcaataaagatgggaaagtccaaatttatcaggagaggaaagtgattatatatatttgcaaacttacaggtcttgagattatttaacttgattagacaatagcatatctttaggaagtcatctaaaaataaagaaagcttatttaaaaactacctcagaatgggcaagccctgggcctcaacaattaatatccaattattccacacaattaaactacagacaagctattaggatatccctgaatctagaaaacatctataacttcaaacatataataagctaaacattttttaattggtagagatctatattttattcttagcttaaataataattaaagttaatatgaaccatcagcttcatttttcaggagttgatcctgttccctggaagctaaaaccccacgtctccctgaaaagaaaacacaagtaacctagattaaataatcaacttttctgaattaaaaccatgacctttatagtatagcccaatagattgaaatgtggttgcttatagcagaaatatagggagatagacttttacaagacagaagtcatgccacatgcaaatatgaaaaggagaaattaatgatgccccgatcctacatgtgttagttcttcaccctaaactcagaagagtctcttgttccgatagagctggtctattcattcgccaagatcataccgtgagttccttaaggataatatccaaattttacccatgtttaagtctccagaaactgacctatagttgacccccactaaatgtttctggagtgactataactggtagattttggcttaaaattttgctagaaatatagcctcctcatccaaacaacacaggagattctaccatgtgtgaagaggacattttacaagatagactccatcctggaaaagagaaacattttaaatagcgtttgaaaaaagtggcattaaaaacatctatgacaaacttaggggtttatcattgaaaacataaagtcatgttaactttgtatggcactgaagaatgccaagataactaaagagtagattaagccagatgctgagtctttaggttttcaaagtaagaattatccttcaaacgtctgaaaacattccatttagtctaaactacagccaactcactggaaattagtacgtgccaaggtggcaattaaagctgaaattaaatgttttgcttttaacctaacgattgattagggaaggcatgcaaccttaaggaaaaaatcaaaacatctttttccttatatcagaattgtgtcttcaagaacagtcaccgacttacaaattttcaacttagatgatgggtttatcggggtattaaaggcattttcgattcatgatgggtttatcggaacgcaatcccatggtaaatccaggagcacctgtatgttaagagcggatcacgtctcttgtggttagatagttaatccagtagtctccaccatactttttctcgtcatatctccttactgccggcccagcggtcgcttaaacaggcaagaggctggctaagtggataaaacaccaacgcttaggaccctaagttagataagcgactgaatactggcgaggctggtaccagagcttgctcgacaggacattcacagccgaaagttggaacaaacgtgtccacgtccaaaaggcccggatgctccaggcaactttcagcgcggctcgaggcggcttccgggagccggcgactcggaggcccggacgtcgggcgatcagccagttcggaccccaaggccggagaaagctcggccgcggcgccccgaaaagagaccccattcattctccccgctccatttttccgccgcgcggcccacgaggcggcggctccggagggcgcgcaaggggccggaagggccaccgctccttcccgccgcgcgcccctcccccgccaccgccgcgccggcccgcctgggcctccccggtcgccctcccaccgcctcaaccaccctgcgccccgatcgcgcccaacccccggcggggggctcccactcacttgtctttctcggtgccgaagatggaggccagatactccgccatttcccacccgccgccgccgctgccgtcgacactgctgccgacgccgccgaccctgccgacgcccgcgggagacgtcacccggacgcgacgacgctcttccccgccccgacgtggcagcgctacccagtcaggcgaggtgctgcctgcgcgtgggcgggacgcatgcgcgtagggagcacgtagtgcgcgtgggaggctccgccttttcggtcctgggaacccgcgccccctgccggtgccctccccgcccggccctagctctctcgccttctcgcccgcccggcgctggccctgctggatcctgcgcgccggggactgggggctggcagtgcagaccgaacccggggccgaggggcttctccacagagccgcctggggctcggtggggggcgctcagctcgaccccagctaagggagcactaggaagtgcgggcgtccccttccctgcacccttgcggggcgggaaccgtcgacctagaagaaaaaaaaagctgaggcaaacttgatataagtagagaggttatttgggccaagtttgaagattgcaacccgggagcatagcttcaagttgccctgaacataggatttgcaacagtgacaagtgggtttataaagcttaagaggggggcagttcttaaatagctcaccaagaatttacatgaaaataacaagctattaattggctgtacgttgttctttatatcataattccaggaaaggaagttcatgggtgaaggcagcgggtccggagcaatagtgcctttaaacaattgccaggcatgggtggggaccgctgaagccgcatagacctgtctctccgggccggattaacctcgcacgcctcacatagctcggacgctctgtgttgtttttctcttctcacacccctctccgctttaccctccctcagcgcttgccaggtgcgacctccccggggccctgcactcttgcagttgcctggccaaggccacccacaggtggagctggaaggccagtgacctgcctctgggataccctttcagtctcctcatgtcacaaggctggaaccattccgttggaagggttctattcctctcctgcgttttaaccccatcaagcagccattttcatctggtttcccacattcatcaactcacctgcgatttacctaatttccaacgcaactatcaactctgattaggtagaagtcagagagacagggcctattttacttacctcctccacaagatgagccccagactgtggggcaggaccatgggatcctcttagctcggctagagctgaatgctgagctctagtgtttgggcggatttgcgtgttagaattgcatttctcttggcaacagagcatcttcctacctgggaaagatgagcaaactggaaacctgtattagaaacagtagggcctcagaggtttaaaccaaaaagtatcttgagacagggctcaatcaatttagaagtttattttgccaaggttaaggacaatgcctgggaggaaaaaaaacacggtatcacagaaacagtctgtggtctgtgcctttctccaaagatgactttgagggcttcagtatttaaaggggaaaagtgggctggaggggaaagcggaacagtgtggtaatccacacgttgcaagagaaaagaagcaggttgggaacagtcgactgtgtacagctcactcctcagcaaatcagcactttacataagagaagcggatgttgaaccttctatctgtagccgtctgcttaggaacgaaaggaaaggcagctgcttacatgactcagctttcagctcattcttttccttttgacagagtgaactggggtcctgacttttgtgttcctttcgcagaggtgaggccagagaagtgacaagacagatgccagtccagcaggtgggcatgtccagaaagtgcagcctcaggacacggtctgggaacaaagactgctggagagttggaagctggcaagaggctctcagctgtgaagtacctggggtgggggagaagtggtcggagaaagcagaggtaaggtctgtgcgtgggaactgaactgaaatccacagctctattacaaggaattaatctggttactagaaccagggtagatgatcagaccaggcagggccaccagtaccatccacccatttttcctgagaaaagaaaaatagggtagtctgagctctgtgaggtgtgcagaatgatcaggcccagagaggcaggagtgtgggacttcattcagcgcctcttccaccatagaagcaactgtccagggcaattgtttgatggaatttttgctcctgacaggctgcctcacccattatcttcttgttcacatggaattagtgatgctaagaacgatgcatagccaatcagcaccttctgttattttaatgcaaattcttgctaacaacttagggactgcctcttccttttccttaaaaccccactgtgactgctgctaatgggaacatatgttcagggcaacctaggggcatgtgcccagggagccatcctcaagctttgggctcaaataaactctatacttaatcatatttcctgaatttcattatttgaggttgacattttggcaacccagataggacctgaagcaggccttcagggattgccactaagtagtggcatcaatagttggagccttggtaccagcacaaacgactgttgtttactcgacctcactggggctggcaggggtctctggtaaggccagtcttgggatctgaatcctcccagcttagttgaagattgagacttacacactaataatttgatagggttagaactgaagctccactgaaaggtaggagtttccatttttattctctagagattctgttgactgcagatttgtgattttcacttctgtctgaggttttgcttgtctttttacagtttgcagccttttctctcattcgaaatttggtcaaggagaaagtgtcatctttaaaactggccatattctgaaacttggttcaactgacaaatctaaacattcttcttcttcttctttttttttttttttttttttttttgagacagagtctcgctctgtcgcccaggctggagtgcagtggcatgatctcggctcactgcaacctctgcctcctcagttcaggcagttctctgcctcagccttctaagtagctgggattagaggcgcctgccaccatgccctgctaattttttgtatttttagtagagttggggtttcaccatcttggccaagctgatcttgaactcctgacctcgtgatccccctgcctcggccttccaaagtgctgggattacaggcgtgagtcaccgcgcttggccattttcttctttagtgaccaaaattcctccccttaggcatttttggtcattcagaaggaaaatctaaattatggacacttgtgcttctagagcagacatgcatctgcagagacggcagctggattcgtggacaatgcttatggtgccaccttctgtcagtatctagaaacatggtctcacttaacccgtgaagaccccagactataatagctaaaatggggcgcctttaaagtaactagtttatgcactcaataggaaaaatctgcatctaaaatttaaaaactgagagagctatttttcaatgatacttagaagcttctaaaagaagttctgatgaagtcatttctttgcaagaagaaaacagaagattatctgaaactatttcttttgtttgtttgttttgagacagagtcttgctctgttacccaggctggagtgcattggcgtgatcttggctcactgcaacctctgcctcccaggttcaaacgattcttctgagctgggattacaggcatcccccaccttgcctcgcaatttttttttttttttttttgagacagagtttcattcttgttgcccaggctagagtgcagtggcacgatctcagcttgttgcaacctccccctcccgggttcaagcgattcttctgcctcagcctcccagtagctgggattacagacacccaccaccatgcctggctaatgttttgtgtttttagtagagacagggtttcaccatgtaggccaggctggtctcgaacttctgatctcaggtgatccaccagccttggcctcccaaagtgctgggattacaggtgtgagccaccacgcccagccatccacagttctttttaaaatttagaagtagtttcaggctgggtgaggtggctcacacctgtaatcccagcactttgggaggccaaggtgggtggatcacgaggtcaggagttcaagaccagcctggccaagatggtgaaacctcatctctattaaaaatacaaaaattagccgggcatggtggcgggcgcctgtaatcccagctacttgggaggctgaggcagagaatcacatgaaacccaggaagcggaggttgcagtgagccaagatggcgccactgtactccagcctgggtgacagagtgagactctgtctcaaaacaaaaacaaaaacaaacaaacaaaaagaccatggaggctttctcctgtttgtttccagctgctgcttctccttctgcctctgggatgatctaaactcatctctttctgcctgttccctcagctcccatacatctcttaagcagtgtttttggaattccacaatgcacacatttccttctctcaaaaaggggaaagtatatttaaatttggaacagactgggtgcggtggctcacacctgtaatcccagcactttgggaggccaaattgggcagatcacctgaggtcaggagttcgagaccagcctggccaacagggtgaaaacccgtctctactaaaaataaaaaaagattagcggggagtggctgcgggctcctgtaatcccagctacttgggagactgaggcaggagaatcacttgaatccgggaggcagaggtcgcagtgagccgagacggcgctatcgcactccagcctgggcgacaagaaggaaactgcgtctcaaaaaaacccaaaacaacaacaacaacaaaaataaaaaataaaaaataaaagaaataggccagaaaagaaatgttagctcaagcctgtaatcccaacactttgggaggccaaggctggtggatcacatgaggtcaggagttcaagaccagtctggccaacatggtgaaaccccatctctactaaaaacacatgtggtggcatgtacctgtattcccagctactcgggaggctgaggcaggagaatcgcttgaacccagtaggtggaggttgcagtaagctgagatggtgccactgcactccagcctgggcgacagagcgagatgctgccaaaaagaaaaagaaaaagagaaaggaagggagggaaggagggagggaaattaaaaaaataaaatgctaacatccagggaattagttcagctgagatcagatctgaaacaagtcaaaaccctttaaatgctcaaactgcctgctctggagcccctgcagggtttgtcagtgctccagcctgtgggccagaggctatgagtctctacaaacatgaggctatgtttgcagcctgggttcaatttccagtcctgttttttttttttttttttgagacggagtcttgctgtgttgcccatgctggagtgcagtggcatgatctcggctcagtgcagcctccgccttccaggttccagcagttctcctgcctcagcctcccgagtagctgggattataggtgcccaccaccacgcccagctaattttttgtatttttagtacagacagggtttcaccatgttggccaggctggtcttgaactcctgacctcaggtgatctgcctgcctcggcctcccaaagtgctgggattacaggtgtgagccaccgcgcctggccttcttttttttttttttttttttttgagatggagtttcgctctcgtcacccaggctggagtgcaatggcatggtctaagctcactgcaacctccacctctcaggttcagtcaattcttctgcctcagcctcccaagtaggtgggattacaggtgctcaccaccacgcctggctaatttttgtgtttttagtagagatggggtttcaccatgttggccaggctggtctcgaactcctgacgtcaagtgatccacccacctcagcttcccaaagtgctgggattacaggtgtgagcagcaagatttctttttctgagctgtctttagagtggttctgacgcttaggaagactgctttgcatttctttggagatgcttggttcagccttggttaagtcatgaccttcgttatgccattaccttggttaaatctttgtttttgagatggagtctcgctgtgtcacccaagctggagtgcagtggtgcgatcttggctcactgcaacctctgtctcctgggttgaagcaattctcctgccttagcctcccgagtagctgggatgacaggtgcatgccaccacacctggctaatttaccttggttaagtctcactggttttgtgagtaacttgaaaatgtccatttcgtttttttttttgagatggagtttcgctctcattgcccaggctggagtgtaagggatggcctgatctcggctcactgcaacttcggcctgccaggttcaagcggtcctcctgcctcagcctcccaagtagctgggattacatgcatgcaccaccacacctggctaattttgtatttttagtagagacaaagtttcaccatgttggccaggctggtcttgaactcctgatctcaggtgatccacccaccttggcctcccaaagtgctgggattacagacatgagccaccgcacccggccaagttttttctttttttatatgtaataagttggataaagtgtttataaaaagttaaaagtaggccctcaagcaggtaaagtaggcttgcttcttttcagagctatccatgctgattccaggcatagagaatgcctcctttgccctattcattaaagggcttcaccctgaagtcagtaatctaatagagaaacaagctaagttgaaaagaccctgtgatggttaatattagctgtcaacctgattggattgaaggatggtaaagtattgttcttgggtgtgttgtgagggtgttgccagaggaaattgacattggagtcagtggactgagagaggaagacccaccctcagtgtgggtgggcaccatccgattggctgacagtgtggctggaacaaagcaggtggaggagggtgggagaagctggcttgctgagtcttctggcttttgtagccacccagtgagttcacctagccggctgcctagatggagcggatttatcaggacaggggaattgcaatgcagaacgagtaatttacacagagctagctgtgcgggcgactggagttttattattactcaaattagacatcccaagaatttgcagatcagagtttttaaagataatttggcggctcaggaagtaggagtgctgattgatctggctggagatggaatcacagggaggtcaaagtgaggtttccttgctgtcttctgttcctgggtacaatggcagaactggctgagccagatagccggtctgtgtggtatcagctgatccatagagtacagggtcttgcagaataaatacctcaagcactgatcttcggattacaatggtgatgttatccccaggagcaatttcgggaggtttggacagccagaggctggatgacctttaaatcaaaatttctttttttttttttcaaagaagccccattttattacagagagcatacaaagccgtttcctcataaggaaaagtacagcttcccttctccagggtgacagatgagccttttctgaagttctcagctttctcttctatcgatatttcccatgtcagttaaagtgtttgtagagacagctgatgcgtttattgaggttgtgcagctcatcagcaaacattctgtttccaaccattttcttctttagcatacagcgttgcaattcattccccttccaatctcgaagccatatggggtccctgatcagcttttggggtgcttttcaaagtttcccaggatcctgatgttgtcatacactctgaacatggccatcctttcgttccaaggatcaactactttggggggtaggagccttataccaatcaatctaggaataccaagaaagaagcttctgcatgccacacctagtcccacaggcgcctacctgccctacataagaggctccctgccatttctctagtctgccccttcaacagcacaccaaataagcccaagaatgaggaccagatgtggccttcaagaagacaacaggaaccgtccctgtcgacttcacacgggtactaacgtgaaggcagccaccttgggccttaaaatttctaatcttgtagctaatttgttactcctacaaaggcagactggttcctaggcaagaaggggatctttctgggaaatggctattatcaattttgtttcagagtcaaactataagctaaattccttcccaaggttagttggcctgtgcccaggcatgaacaaagacagcctaaaggttagaagcaagatggagtcaggtaggtctgatctctttcactgtcatcatttcctcagttgtaatttttgcagaggcagtttcactttcatctttctcctgtgctggatgcctcctccgttccccctgcccttggacatcagactccaggttctttggcctttggactcttggacttaagccagtggtttgcttgggactctcgggccttcagccacagattgaagcctgcactgttggcttccctacttttgaggcttttggactccgactgagccactcctggcttccttcttctgcagcttgcagacggtgtatcatgggacttcaccctgtgatggtgtgaactagttctccctaatatactccctttcatatatatgtctattctgttagttctgcccctctggagaaccctaactaatgcagacccttgtgtaactttgatatccaaaatatggctttctagcatttagctggctattttgaaactctttgtaaaaaaaatttatatatatgaaggaaatctccatttgtaagggtgtctccctccctgcacccaaactgctagaaactgaagatggggaagacattggctgaagacactgtcttacagtttacatcacagaccttgccttcggtggaaatacttttcctggcaacctcgtcttcactaggtgtagggaccagccccacaggatcggtgggtttttctccccatgtgcagagacgagagattgtagaaataaagacacaagacaaagagataaaaggaaagacaggtgggcctgggggaccactaacaccaagatgcggagaccggtaatggccccgaatgtctggctgcgttgttatttattggatacaaagcaaaaggggcagggtaaagagtgtgagtcatctccaatgataggtagggtcacgtgggtcacgtgtccactggacagggggcccttccctgcctggcagccaaggcagagagggggagagagagagacagcttgcgccattatttctgcatatcagagacttttagtactttcactaatttgctactgctatctagaaggcagagccaggtgtacaggatggaacacgaaggcggactaggagtgtgaccactgaagcacagcgtcacagggagatggtatgccttcggataactgaaggtgggcctgaggccctccacaagagatggaggagtagagtcttctctgaactcccgtggggaaagggagactccctttcccggtctgctaagtagccggtgtttttccttgacactgacgctactgctagaccatggtccgcttgacaacaggcgtcttcccagacgctggcgttaccgctagaccaaggagccctctggtggccctgtccgggcataacagaaggctcgcatgcttgtcttctggtcacttctcactatgtcccctcagctcctgtgtctgtatggcctggtttttcctaggttatgattgtagagcgaggattattgtaatattggaataaagagtaattgctacaaactaatgattaatgattttcatatataatcatgtctatgatctagatctagtataactcttgttgttttatatattttattatactggaaaagctcgtgccctcggtctcttgcctcggcacgtaggtggtttgccgcccacaactaggcttttacctacacccttcttccttggtttgaattcagctctgtgcttttgagatgtgaattttttctactttgtttcacctcagtcatccctttagaagtgccaatttagtgttgcctagctaacagttgcttagggatcatgtaaaagggggaaataaaaactatttgagagcataatcaggttaagtattaatgctaaaacttactttacaagttagttggtcttgctaagatttctctttggtagaaatggggaattggagagaagattctttataaaaactataagatctgcttctgtctgtatgtctatatgtttatatgtgtcatgtgtatgtgatatttcactaccaaaatatatgaaaaagctataattaattggcttaaagaagggactgcttggctgggtgcagtggctcacacctgtaatcccagcactttgggaggcgaaggtgggtggatcatgaggtcaggagatcgagatcatcctggctaacatggcgaaaccccatctctactaaaaatacaaagaaaaattagccaggcgtggtggcaggcgcctgtagtcccagctactcaggagactgaggcaggagaatggcatgaacctgggaggcggagcttgcagtgagccaagatcgcgctactgcactccagcctgggtgacagagggagactgagtctaaaaaaaaaagcacagtgatgctaggccagagtctgggcccctgtgtctgaacagtaggttttcttggagtattggtgtgctctttaatagaaaattgtaagagttgggccgggcatggttgttcatccttgtaattctagcactttgaggccatgagattgagaccagcctgggtaggatagtgagaccctatcactgttattttaaaaattaggaaaaagaaaattgtaagagtttataaaaggtttttgggaatcttactttgtatggtcaaagctgcctgagaatggacgattgataatacactaatataaaagttaaatcttgttttctctgttgaataagaatttcatgttgtgttaagaagagatagtaagctgggtgtggtggcttatgcctgtaatcccagcacactgggaggccaaggtgggtggatcacttgaggtcagcagttcaagaccagcatgaccaacatggtgaaaccctgtctctactaaaaatacaaaaattagccaggtgtggtggtatatgcctgtaatctcagctacttgggaggctgaggcaggaaaatcgcttgaactcgggaggtggaggttgcagtgagctgaaattgtgccactgcactccaatctgggcaacagagcgagactctatctaaaaaaaaaaaagtaaaagatttgtttaccttttgaataaactgcaaaaaaagggggctgggagaatttgcctcatgctatctttattatgtctcttgattgggaactgagtctctgctctattttagagtaaaagagttgctctttgaaatctttatttattttttttattatactttaagttctagggtacatgtgcacaatgtgcagatttgttacatatgtatacatgtgccatgttggtgtgctgcacccattaactcgtcatttacattaggtatatctcctaatgctatccctccccactcccctcaccccacaacaggccccggtgtgtgatgttccccttcctgtgtccaagtgttctcattgttcaattcccccctatgagtgagaacatgcggtgtttggttttttgtccttgcgatagtttgctgagaatgatggtttccagcttcatccatgtccctacaaaggacatgaactcatccttttttatggctgcatagtattccatggtatatatgtgccacattttcttaatccagtctatcattgattgacatttagacacaagtctttgctattgtgaatagtgccgcaataaacatgcgtgtgcatgtgtctttatagcagcctgatttataatcctttgggtatatacccagtaatgagatggctgggtcaaatggtatttctagttctagatccttgaggaatcaccacactgacttctacaatggttgaactagtttacagttccaccaacagtgtaaaagtgttcctatttctccacatcctctccagcacctgttgtttcctgactttttaatgatcgccattctaactggtgtgagatggtatctcattatggttttgatttgcatttctctgatggccagtgatgataagcattttttcatgtgtctgttggctgcataaatgtcttcttttgagaagtgtctgttcatatcctttgcccactttttgatggggttgtttgtttttttcttgtaagtttgtttgagttctttgtagattctggatattagccctttgtcagatgagtagattgcaaaaattttctcccattctgtaggttgcctgttcactctgatggtagtctcttttgctgtgcagaagctctttagtttaattagatcccatttgtcaattttggcttttgttgccattgcttttggtgttttagacatgaagtccttgcccatgcctatgtcctgaatggtattgcctaggttttcttctagggtttttatggttttaggtctaacatttaagtctttaatccatctcgaattaatttttgtataaggtgtaaggaagggatccagtttcagctttctacatatggctagccagttttcccagcaccatttattaaatagggaatcctttccccatttcttgtttttgtcaggtttgtcaaagatcagatggttgtagatgtgtggtattgtttctgagggctctgttctattccatttgtctatatctctgttttggtaccagtaccatgctgttttggttactgtagccttgtagtatagtttgaagtcaggtagtgtgatgcctccagctttgttcttttggcttaggattgtcttggcaatgtgggttcttttttggttccatataaactttaaagtagttttttccaattctgtgaagaaagtcattggtagcttgatggggatggcattgaatctataaattaccttgggcagtatggccattttcacgatattgattcttcctatgcatgagcatggaatgttcttccatttgtttgtgtcctcttttatttctttgagcagtggtttgtagttctccttgaagaggtccttcacatctcttgtaagttggattcctaggtattttattctctttgaagcaattgtgaatgggagttcactcatgatttggctctctgtctgttattggtgtacaagaatgcttgtgatttttgcacattgattttgtatcctgagactttgctgaagttgcttatcagcttaaggagattttgggctgagacaatggggttttctaaatatacaatcatgccatctgcaaacagggacaatttgacttcctcttttcctaattgaataccctttatttccttctcctgcctaattgccttggccagaacttccaacactacattgaataggagtggtgagagagggcatccctgtcttgtgccggttttcaaagggaatgcttccagtttttgcccattcagtatggtattggctgtgggtttgtcataaatagctcttattattttgagatatgtcccatcaatacctaatttattgagagtttttagcatgaagggctgttgaattttgtcaaggccttttctgcatctattgagataatcatgtggttttcgtctttagttctgtttatatgctgatttaatatataatgttaaatcaataaacattatatgtttattgatttgcgtatattgaaccagccttgcatcccagggatgaagcccacttaatcatggtggataagctttttgatgtgctgctggattcggtttggcagtattttactgaggatttttgcatcagtgttcatcagggatattagtctaaaattctctttttttgttgtgtctctgccagcctttggtatcaggatgatgctggcctcataaaatgagttagggaggactccctctttttctgttgattggaatagtttcagaaggaatggtaccagctcctccttgtacctctggtagcattcagctgggactacaggtgcccaccaccacatccggctaatttttgtatttttagtagagacggggtttcaccacgttggccaggctggcctcaaactcctgacctcaggtgatctaccagcctcgacctcccaaagtgctgggattacaggtgtgagccaccatgccaggccgtaaaccacttttcgaaaagaatcaaagtaaaacagtaattgtctacggatgacaaaagacttatagtagccatagttaaagatgcctgtgacaaggaaaattggttatttctgtggcatctaacaatgtaacatcataatcataattatgactgataacatataccaggacatatcaaaattttagaaatctcatatgattttggaacaaatattaatcacacatttatacttgtgtgatacacatataactcaaagaaagttaaacgctattgtttatttgacaatgcttcctgtatgattctaacataccgagtaagcctactatttggatttccaggagtttctatttgttatgtccaggttatgtccacattagttcaggtcaaaaagacttaattttagaatttgaaatttgatttttggctgggtacagtggctcacactggtaatcccagcacattgggaagccaaggaaggcagatcgcttgagcccaggagttcaagatcagcctggacaatatgatcaagcctcatctctaaaaaaagaatttaaaaattaagctgagtgtggtggcgtgcatctgtagtctcagctgctctagaggctgaggtgggagtactgcttgagcccaggagggagaggttacagtgagccatgactgtgccactccagcctgagtaaaagagtgagaccctatctcaaaaaacaaaaaaaaaattgattttgggaagtatgtcaaatatcaaaggtttaaaacatttgatatcaaaatatggccagacacagtggctcacgcctataatcacagcactttgggaggccgaggtgggtggatcacctgaggtcatgagttcaagaccagcctgaccaacgtggcaaaaccctatctctactaaaaatacaaaaattacccaggtgtgatggtgcacacctgtaatcccagctagttgggtggctgaggtaggagaatcatttgaatccaggaggcggaggttgtagtgagctgagatcacaccactacactccagactgggtgacagagcgagattccatctaaaaaaaaaaaaaaaggaaaaaagaaaacatttgatatcaaaataggatcacaggtctgtgtaaaataagtcattcatttagccagaatgggagagagcagtggttctcccagcacggagtttgagatctgagaacggacagactgcctcctcaagtgggtccctgacccccaagtagcctaactgggaggcaccctccagaaggggcagactgacacctcacatggccgggtacccctctgagacgaagcttccagaggaacgatcaggcagcaacatttgctgttcagcaatattcactgttctgcagcctctgctgctgatacccaggcaaacagggtctggagtggacctccagcaaactccaacagacttgcagctgagggtcctgactgttagaaggaaaactaacaaacagaaaggacatccacaccaaaaccccatctgtacatcaccatcatcaaagaccaaaggtagataaaaccacaaagatggggaaaaaacagagcagaaaagctgaagattctaaaaatcagagcgcctctccccctccaaaggaatgcagctcctcaccagcaatggaacaaagctggacagcactaaatacccacaagagaaagcaggaaagttctaaaattgacaccctaacatcacaactaaaagaactagagaagcaagagcaaacacatttaaaagctagcagaagacaagaaataactaagatcagagcagaactgaaggagatagagacacaaaaaacccttcaaaaaatcaatgaatccaggagctggttttttgaatagatcaacaaaattgatagaccgctagcaagactaataaagaagaaaagagagaagaatcagatagacgcaataaaagatgataaaggggatatcaccaccaatcccacagaaatacaaactaccatcagagaatactatgaacacctctacacaataaaactagaaaatctagaagaaatagataaattcctggacacatacaccctcccaagactacaccaggaagaagttgaatccctgaatagaccaataacaggctctgaaattgaggcaataattaatagtctaccaaccaaaaaaagtccaggaccagatggattcacagctgtggtcccagctacttgggaggctgaggcaggagaatcgcttgaaccctggaggtggagattgcagtgagctgagatcacactgctgcactccagcctgggaaacagagggagactctatctcaaaaaaaaaaaaaaaaagaaaagaaaaaagaaaagaaaaaaagtggtttacaatcagctgcagtccaaagtttatcttttcttcaaggaaattcatggaaaggacactgagaagtactcttgaatacaggtttctaataaacttagagatcataccattggactaggtaaaaacttccacaacactaatgaaaaactgatgcattcatgaagatttctaatccagcatcaggcattacaataattaattacaccggactgaaattatttttatgacttttttgttggaacattgctaactctttttgttttgttttcgagagttaagaaaacttttgttttttttttttttgagatggagtttcgctcttgttgcccaggctgtagtgcagtggtgcaatctcggctcactgcaacctccgcctcccgggttcaagcgattcttctgcctcagcctcctgaatagctgggattataggtgtgcgccaccatgcctttagtagagacggggtttcaccatgttggccaggctggtctcgaactcctgacatcaagtgatccaccctccttggcctcccaaagtgctgggattacaggcgtgagccacagtacctggccaaaaactttaaaaaaaaaaatctgtttagagcttatagcaattgggtaaaatatatttttgtgagcaaaattgaagcatttatctttctacctgatttctccagaattcagaaactatgaatgagtattcttattttattgtaatataattatttgcataattttagtaaaaaatttttttcctttgttaacagaacacaattgaaggcactggttattctagcaaggctttgactggaatggcatattttcagatatgaccagactgctctgaggaattcaggttggctttatagagtcaataaaaagctacctggaaagagtggccatgtaccttatctatacagttcccttacaaggttcctgatcttgaggtaagtaaataatgtccctttctgacaggcccaggaacctcaaatattttggggccttgagaaaagaggaactcacccagttcatgcaggtgttacaggcacaatctgaagatgaatctttggctttttaaagcctcagattaaaaagtctaatctgaaattctctatgaaaattccttcaaagccaacttgaaaagaacctttatgatcagtcattattcttgttccactttatgcaaataatgaagctgaatataatgctaaaacttattttacaagtaacttggtcccactaagatttatctttggtagaaatggggaatctgagagagaaaaattatgtttcagaagaaaacgattttatacctattgatagattccagccctgatgattgtttctgagtttttgttattttcctgcaatccttaattatttcctggctacaacaagtctttaaagaaggtctgggttttaattttctttatgatgtttttagttcactcataaattgaattgttttcttctgttctggcatacacatttctttctgattataattcttatgtgtattatatttctactatgtatctctctctctctctctttttttttttttttttgagatggagtttcactcttgttgcccaggctggagtgcaatggcttgatcttagctcactgcaatctctgcctcctgggttcaagtgattctcctgcctcagcctccagagtagctgggattacaggtgcttgccaccatgcccggctaattttttgtatttttagtagagacggggtttcaccatgttggccaggctggtctcaaactcctgacctcaagtgatccacctgcctcagcctcccaaagtgccgggattgcaggcatgagccaccacgcccagctgtatctctcattgttttagttcccctaagaaaaccaaattcatggtattctgaagactagagatgattcaacaggcaacagcagttatataaattgatgacttggctgaggtctcatttttgccaccctgtgatgccatcccaatttggcttttggctttcttcagattcctcactgagaggtatccttccctgatataatttggatatttgtcctcacccaaatctgatattgaaatataatccccaacattggaggtggggcctggtggaggtggttggctcacggtggtggatttctcacgaatggcttagcaccctccctttggtgctgtcctcgtgatagtgagttctcatgagatctggtcttttaaaagtgtgtggcacctcacctgccactctctccctctttctctcttgttcctgctttccctttgtgacatgcccactctccctttaccttttgccctgattgtcagcttcctaaggccttcctagaagctgaacagatgccagcaccatacttcctgtaaagcctgcagaaccatgtgccaattaaacctcttttcttatatattacccaatctcaggtatttcttatttttatttatttatttatttacttatttatttattttcatgcaagataggttcttactctgtcacccaggctagagtacagtggcatgatcatggctcacggcagccttctcctcccgaggctcaggtgattctcccacctcagcctcccgagtgactgagactacaggcatgtaccaccatgcctggctaattttttttgaatttttagtaaaggtgaggttttgtcatgctgcccaggctggtctcaaactcctgggctcaagccatctgcccacctcggcctcccaaagtgttgtgattacaggcgcgagccagtgcagccagctggttatttctctatagcaatgcaagaatggcttaatacatctcccctcccctacatgggacaaggccatctgataattaaccttcctagcaactcaggactaagctcctgaacataaagggagccaaaacaatttgcatttttctatgaggccttctttgaaaggtcttgatgaaaaggggagaaatggggaaaaaaatagcacagagcagtctgagctatgtgaggtgtgccaaagttatcaggcccagagagacaggagagtggggctttttgttttgtttttgtttgagacaacatagtgagagcctgtctttataaaaaattttaaaaaattatccaagcataagggcatgtgcctgtggtcccagctactgaggcaggctgaggagagaggattgcttgaatctgggaggttgaggctgcagtaagctgtgatcacaccactgcactccagactgggtgacagagtgagaccctgtctcaaaaaaaaaaaaaaaaaagaacccactgctgctaattggagcatctattcaggggaacttgaatctaggctcccaggtggccatccttaagctttgggcttgaataaactttgtacttaatcatagtttctaaatctcattatttaaagtcgagaattcattcctcccttcatctgttcattcatatgtctgtcctttcacccaccaatccgctcatctagccatccacccatttgtctgttagtccgtccatccatccatccatccatccactcacccagacatccatccatccatccatctgtcctttcacccacccatttattcatccattcatccatccatctatccatcccactgagtcattcatccatctatccatccatccatctgtccgtccatccatcttatattttggggggcatgtctgatgtgtcagatactgtggcaggtgcacagacacaaattcggaagacagatctccacttagaagtgtgccaggcacctcagctcaacatatctccagctgacttcattttatccttctcctcccatctcttgacgttctgttcaagcatttagtaaatgccagtcatctatagcctgagcccacctgggttgccctaagttgtctgattcacatccattctaattccttggcttctctcaaccatgtctgctccttttcctcctcttggccattcctgagtgtacctggatcactacagcagtatctatgctgtttcctccttttctaggtgaccatttgtccttctgccagagggctctgtgggaaatacagattcgatcctgctgtttcttactgggaaccctccatggctcccagtccctggaatgtgccgggcaactttcagctcttggtcgtgggagcctcctgcctgtgcacagtgtgttcttccaggacccatgcccactccctccttcccagcattccagtttggcccttgaggcctccttggagtcatccccctcccagatgtgcaatgcattttgggttctcaacagcttcccctccttacctgcaaaggttgaacagacctggatctgctatcctgctttgccacttcctgctgcatgacctgcattatgaagttctctagactcagggtttccattggctaataggatcagccaacctgcctttgaggagtggacgaagcttggcacttagtaggtgcccatgaggcatcagaaactgcccttgttgaatgatgctctaatgcggtgttgacatctctgtcctactagactggggttgctttgaggactccaattctgtcttttcatcctgattccatgatggaacagacccacaggcccttgtcagcattccaaaaagcaaaaagctgtgaaaatgaaaaggactttttttttttttctgtaaacttggtgccaaaatttgcaaaagctgacctgacccaaggtgttggcagcatcccaacactccctctgttacaggcacctctgctggttgctgacaatgtatatgttttaatttttaaaatgcatttgtctttttgtgaccatgggtttaattgcactgtgaattcatacaaaaagggtagcatgtacccagtgctcactgtgggaaggacacatggaaacactctctttgtcaatagtgcagaaagcatcagtgatgttgggaagccatcaaaagacaagcagttgggctgtgcgtggtggctcatgcttataatcctagcactttgggaggctgaggtgggaggattgcttgaggtcaagagttcaagaccaacctggccaacatagcaagatcccctctctattaaaaaaaagacaaacagttgaaaatttataataattgtgattaccaagagccattgaaatatggaaaacacagggtcagtggggtgtggtgtagggagagagatcttgaccaggaacggatggaacggaattggcaatgaagtagtcactgtatgccaaggagtggtttgttggttatgaaagaagctggaatacagcaggaagaactgaactttaaaggtgagcatgaatattcaagaagtgtcatggtgtaaaacaatctgcatagctgtggtggaaaggcttctttcctgatcaggaaacagctgaaaattacattgatggatttgtatcctctgaaaaccttagtctcaaccaggcgcggtggctcacgcctgcgatcccggcactttgggagtccaaggcaagtggattgcttgagcccaggaatttgagaccagtctggccaacgtggcaaaaccccatctctgcaaaaaatacagaaattagccaagcatggtggtgcatgcctgtagtcccagctactctggaggctgaggtaggaggatcactgagcccagggaggttgaggctgcagtgagccaagatggtgccactgcacttcagcctgggtgacagagagagaccctgtctgaaagccaaaaaacaacaaaacctaagtcagaacaagtttgtgtagctgatgagtcaggcagcttcacctgtgctcctttctagacaggcaggatggttgcggagagtcacaacaggcgtccaggaggaaaggcacgagatgatgctggccaaagctagttgtggttggaaaaagccactggtgtgaacggtgtatgctagtatgcaagggaacatatactgggaactcgagccatgttttctgcatggtttaataatcctttgtatcagtgccaggaattcactgcagataagctggtctggaagaaaaacgaacattttgttatttctgcacagctgctccacacattcctttcctgaaagtcttttgaaaagcaatgtttctgacatttactttccacgatttgtgaagggagttttacactccaataagagtgaatataaatgattttttggggggaagggggaatcctgccattaacagaaagcagggcttcctgactaagttcactcacaaggctgccattcacacagtcacaaatgctcggacaggatggacagttccactaacgtgcgcttggttgactgtgtgaaccccaaccatttgagacaggcctcagttaatttagaaagtttattttgccaaggttgaggacgtgtacccgtgacatggcctcaggaggtcctgacaacatgtgcccaaggtggtcggagcacagcttggttttagacactttggggagacctgagacatcagttaacacatgtaagatgaacattggtttggtccggaaaggtgggacaactcaaagcaaaagcggaactcaaagccggagggggcttccaggtcatgggtagataagagacaagtggtcgcattcttttgagcttctgatgagcccctccaaaggaagcaatcagatatgcatttatctcagtgagcagaggggtgacttgcagtagaaagggaggcaggtttgctataagcagctcccagtttgacttttccctttagcttcgtgattttgggggcccaagagattttcctttcacaactgcacgagcactttgacctaaaacaattcttgaaaccgaacctggagataaagcccatctatggcagaagaaggtgatagcaaaccgcattattgaccctcaaagtttatcaaccaaaagtggagtcaggagaaagtcacagagaagagatgctgaacctagaaatggggcacctattgtgcctgcctcgcatgatggagaaattgctggaatcgactgaataccagtgacaatgggaggggaaatgtcggggagatgtggaccctggggagtccccacagactatctggcaatatctgtggcctgctaactgctggcttcaaggacatttatcagtgagcaggaggacccctgaattagagagatgcttaggtgtggcactggtgttgtgggaggaagtgccgagaagcccattgacacggtgctgccccaggacttcagagactcttcaatccatcctccatgctgcctccagccccatgacctcagcaatgtatcactgctgtgctccctttcccaagacccccaagcagccagatgtagcctgattcattacatgtatgcatacaggtgtcaatctaaaatagtcaaaagggccagaatctagtttaaggagagtttattcaagtgcaaggtttaagtccagccatccaggaagcacagattccaaagaatggaagtcagtgttctgaagtatagaagtttgggaccatgtatatagataaagtttatggaagcttaccagaatttcaacatctttaggctttaatgcatagttacaatggtctgattagtcgaggtggtctttttctttcaagaaaggtgtatttggccaggcacagtggctcatgcctgtaatcctagcactttgggaggccaaggtgggcagatcacctgagggcaggagttcaagaccagcatggctaacatggtgaaaccctgtctctactaaaaatgcaaaaattagctgggcgtggtggcaggcacctataaccccagctactcgggaggctgaggcaggagaattgcttgaacccgggaggcggaggttgcagtgagccaagatcacaccactgcactccagcctggacaacagagccagactctgtctcaaaaaaaaaaaaaaaagaagaagaagaagaagaaaggtgtatttaatcttccccactgaagatgcaaccgtcatgaggtctttgcgccatctgatctgagttgggtacaggacaataaaggaggcagctaatctgtaacagagatcagtgatgggaaggaggagatctggtctctgggagactgaggcaggaggattacttgagctcaggagttctttttttttgagacgagtctcgctctgtcaccctggctggagtgcaatggcgcgatcttggctcaatgcaacctccacttcccaggttcaagtgattctcttccctcagcctcctgaggagctgggattacaggtacttgccaccacgcctgcctaatttttgtatttttagtagagacggggtttcaccatgttggtcaggctggtcttgacctcctgacctcaagtgatccacccgcctcagcctcccaaagtgctgggattacaggtgtgagccactgtgcccagtcgagctcaggagttccaatccagcctgaacaacacagcaagaccctgtctcaaaaagaaagaaatatgacaatatgactttgcagcgtttcagaacatcaataactttgcagttcttcatgtttctcctagtcatgtccagaacaaggaccctggggaagagagttaagctgtaatctaagaagcagaatttgcaaatatgctactgactcagtctccagggcttaacatcccctttgacataataaatttagagggtcctgaaattttatttgcttttaaacgactttttttctttcacagacatttggcttcacttgaacctgtgtttgaagctttagtgaacattgtctttgggagtaagaagtactagaaaatttatggtatgtggttatcttgctatttcatgaactactgtattactatataaatcagctggaagcaagctgtaatcctgtttatgggatatttgttccacttaccatgatgaatttggctgcagaaatatcagtatatttgcctttggagtcctgcctcagacccctgatgagggctatgcaatctatagtacttgcttttatttgtttattctgctgtaaatggtttgtttgaatttttttttttttttttttttttttttgagacggagtctcgctctgtcgcccaggccggactgcggactgcagtggcgcaatctcggctcactgcaagctccgcttcccgggttcacgccattctcctgcctcagcctcccgagtagctgggactacaggcgcccgccaccgcgcccggctaattttttgtatttttagtagagacggggtttcaccttgttagccaggatggtctcgatctcctgacctcatgatccacccgcctcggccttcctaagtgctgggattacaggcgtgagccaccgcgcccggcctgtttgaatgttttgtttgcgaaaatagccttaattttcccttcactgtttccatgcaccttagaaataggacttcgtagccggttgtggtcatacacacctacggtcccagctacttgcaaggctgaggtgggggtgtggcaggccaggtctcactaacacaggcctccataacaactgtttcagtactgaccaagtggtaaagttaaatattaaaagctgaaagagccagcgcccttatacaaaggctggaatgtaacaaaagcccaccaagagttttgcccaggcctttcctgggctttaaagcatgaagagataacaaaggaattcttaacaggacccatttaggattaaacaaattttattgggggtctgaagaaactccccaggcctccacaaacaggctttactggagactaaaggaactccccaaacctccatgacttagcaggaggccagatccgggttttcaccccagcacctggacccagctaggttaattaaattcactgaggctccggaggaaggtcttctggactcagatcttagttatggattagaagttaatcacttatgtctttagatggatgcacactcacacgtagacacacagctgagaaggtatagaagctctggaaaacgctgtcattttaagttggtctggtgataatttccaggccttctctctgtaactggttacagaaataaaaactcccttctctcctagttcatctgcatcttgtcactgggacatgagcataggtggtctaccttcagtttggtctgtgaacaggaggattacttgagctcaggagttctagtccagcctgggcaacagagcaagaccctgtctcaaaaagaaagaaagaaatgaggatatgagtttgctgctctttaaatcgatgactttgcagctcttcatctgaagaggtggcgtctgtttctcctgtttgagtgtggcacatccaggagagtggctttgagcagtggtgtggcagacgtgactgtaggccagccctgagctgaggctgccaggggactgcacacttcttctctcagctctgccagctgctgcactgtgtctgggccagcccgctggagcacagagttcagtgcattgggacagctacagcccattgcatcgggacagcccacagcaacaagacccacctgtcgccactgcaggtgcgtgagggtgcccggctgagagcagacaaaccgcctagcaggtggcttttcaagcggaatcacagactagctccatcgctgtggtgaacgttctccccagtgccaggattccacttggcccctgactgcttgagcagccgatgtgacagccatctctctgctgccgtgcatgtcggctgggctggagccagtgcatcaggaagtagacgcagaagtggatcaggagcaaaacattcctgagagctggcagaagctggcgtctggagccgctgggatgcgggtatgggctctctcagtggcggaggaacagcctcctggcagaaccaaaggttgctttgtgccttcgatgctgctgctggccagagtggttttctgtctcagaccctgtaccacgtgtctgttctttctcattttttacttaaaggagaagaaaatgattatgtgtacatgctggtggcacacataacttagtattaagtattacaaagtcttacaggcagggcacagtggctcacgcctataatcccagtattttgggaggctgaggtgggcagatcacctgaggtcagcaatttgagaccagtctggccaacacagtgaaaccccatctctactaaaaatacaaaaattagccaggtatggtggcacacacctgtaattccagccactcaggaggctgaggcaggagaatcatttgaacccgggaggctgaggttgcagtgagctgagatcacaccactgcactccagcctgagtgacggagtgagactctgtttcaaaaaaagaaaaaaaagtctgaaaagtcttacagacccaaggaagaatttgtcttcctctgtgagaggggagatgtgctctgatgatataggagaaaaccccaaaatcagtatcagcccaccaaccagggcagtgaagccgcacccagatgcaccacacatggcagtccatgaacagccgggcttttgtaaaggccggtgctttatggaatgacgctctgccgggcccgggttctggggcttccagtcactcagtcttttgtttactcatccattgcgtatttcttgagcacctcctatgaaccagatgctgcttgaggaactggggttaccagggcaaatgagaccaggcccctgccctcgggggccccaggttcagtgggagagagaagacaaaaaaaaggaaaagaagtgagctaatttcagatagtgcttagagctgtggagagaatgcgtggcactcggaggccctgagcagcccagatggtgaagcagctgtggttgtggtgttgagagtgtgaccctgaaaagatgtagagttgagagtgagtgaaggcccggggtcggcaggggcggggtggcggctggagcatgagctctatgtggaggagcagtgagcagaccactgtgcccggaacttggtgggggtccagggccaggtgaggctggcagagtttggggaggggctcctggcccaaatcaggtgggctgtggcatggagcatgatgtcatcctaaaaccatcctaaggacacttcagacggtcactttctcaatctgggccttggtttgttgatctgtggaatgggagttgcactagttgattcctggggtcccttctgaaacccccaactttgtgagtccatgacatgaaacataacccccctgccatggtctgcagaaagctgtaaactctccctccccagggagacagacgctcgtctccctggctgcccaaagcgcagggagtctcatgttctgatggctctttctttctctctttctttctttttcttttcttttttttttttttaagatggagtctcactctgtcatccaggctggagtacaatggcgagatctcagctcactgcaacctccgcctcctgggttcaagcaattctcctgtctcaacctcttgagtagctgggattacaggcatgcaccaccacgcccagctaatttttgtgtttttagtagagacacggtttcaccatattggtcaggctggtctcgaactcctgacctcaggtgatccgcccccctcagcctcccaaagtgctgggattacaggcgtagccactatgcccggcttggctctcactttcgtgttctttccatgtaatcacacatgaatggttgtcacaagatctcacagggaaataatttagcaagtgaatctcagttttaaaaaggaaggtgtttgtgttttatcagcatctgtaattgatcagaccatatagttaaacccctaagaagacttaaggtcttatctccctcagctgagacttctgtgacaaatgccacagatacacagattaaacaacagaaattgatttctcacagttctggagcctggaaattcaagatcaagctgctggtcagtgctgttcctagtgaggtctctcttcctggtttgcagacagctgccttctcattgtatcctcagacggtgaggagagagagagagtgagcaagctctcttctctcttcttataaaggcactaacctcattatagggccccatcctcataaccttattacctccgagtcctcacctcctaacaccataggaggttagggtttcaacattttaattttgataaatattcagttcataacaggtctgcacctggggtccatataggtcagttttatttccagcagaataatggtgatctgtaccaccattacacctgcctgtatgcaggcaacccatattcatggctttccataaatggctttattctttccgaaaatggcatttttatttcgcttactgtgtgtgtgattaataccttctcatggttcaaaataaaaataaccaaaaagtcccctgctggctctgtgctcagcctcctacaacctcaccaggagcagccagtgtgaccagtttcatgcgggccctagagatattttatgtagttacaagcaattgcatatgtatttcctgttttggcataaatgttagcacaccatacatacgttgttctccatgttatttttatgtaataagttggagatatttccatatctctagaaggaaggagatacgaaaacaaagaatttctttttgtgtgtgtgccacaatagcaaagaaatttcttcatttttcaatggtaaaatacacgtaacataaaattcaccattttaaccttttactaataagtgtacagttcagtgatattaagtacatttgcattgttgtgcaaccatcactaccaccaacctccagaactcttttttgtcttgcaaaatcaaaactctgtccccgttaaacactaactgcctgttctccttccctcagcccctgacacctaccattctattgtccgtctctatgcatatgactcctctaagaaactcaaacaagtgcaatcatttgttcttttgtgactgtcttttttttttttttttgagacagaatcttgttctatcgcctaggctggagtgcagtggtgcgatctcagctcattgcaacttgcactcctgggctcaagtgattctcctgcctcagcctcccgagtagctgggattacaggtgtgtgccaccactcccagcaatttttttttgtttgtatttttaatagaaacagggtttcaccatgttggtcaggctggtcccaaactcggattacaggcgtgagccactgcgcccggcctgtgactgctttgttttactgagcatattgtcttcaaggttcatccatgtggtagcatgtgtcaaaatgccttcctttctaaaggtgaataatatttcactgcatgtacagaccacattgtgtttatctgttgacctgttggtggacgcctgggttgtttccacctcttggctgttgtgaatgacgctgctgtgaacatgaatgtgcagatttcctcatttttcaaccactgcaggctgttccacgcagcagaggctggtacacctactctctacggtgcacatttagggagtgtccgtttttcactaacaccaacagctgcaacagtaatcttgtgcacaggtgactgcacatgtgcgactctgtatttgcagcatacagttctagaggtggcatggctgcatcaaatggaacgtgcgtttgtaatttggttaccccatgtctctaaggcattttagtttggcagctgttagaagctggtttcggatcaaatcttgcaagtggcgggagggttgtgggtgtctttatcaggctagagtcatggaaagaatgtgcccctttcagaccttgacctctgttggggttacatctttaaaggcaccgtctttccactttggaaatggaagtgtcccacttgctgtgctgacggacactagagggcggagttccccatctttcaggcaatgtgaaggctcagtccacttctccacttctgcaactacagaggtgattatttgggaccactggattggggggagaaagtcagtgtctcccaaggggtacggcacaggacagagaaccagtattggagctcagacaggctcgggggactgggagatggaagccatcgcctttaccttgggcatttcatcttaggtcccatggaaacaggggccatgggttggtacttatcatttcttttaaacagataatggcatacagtaagtcctcaatttcatcacagcttcctggaaactgtgactttaagcaagacaacatataatgaaaccaattttaccataggctagttgatataaacaagagttaaattcctatgtcataggctgggtgcggtggctcacaccagtaatcccagcactttggaaggccaaagcgggcagatcacctgaggttgggagttcaagaccagcctgaccaacatggagaaatactaaaaatacaaaagtagctgggtgtggtggtgcatgcctgtaatcccagctactcgggaggctgaggcaggagaatcgcttgaacctgggaggtggaggttgcagtgagccgagatcacgccaccgcactccagcctgggcaataagtgtgaaactctgtctcaaaaaaaaaaaaagaggcatatttctgctctcaaaacatcaccagaacaggtgtggtggctcacacctgtaatcccagcacttcgggaggctgaggtggcagatctcttgaggcaaggagttcaaaaccagcctgggcgacatgatgaaaccccatctctacaaaaaatgccccccaaattagccaggaaaggtggtgtgtgcctgtggtcccagctacttaggaggctgaggtgggaggattgcttgagcctcagaggctaaggttgcggtgagctgtgatcacaccaccacactccagcctgggcgacggaacaaaaccctatttccaaaaaaaccccacaaaaaaacaaaaaacaccaccaaatttctaaagacccaaacacttctaatattaaacattgaaataaatgtaaactatccctacatgtagaggtagctacacctacataaggaagattaatacaaacaagtgagatcatgatctacccaatatttgggatgtccgtgagtgatggcggtggtagtggtggtggtgaaatcacggaatcaatgtctgcaaagcacacgctcttgggagcacctcctcccaccgcacagctgaaagacaagcgaccgtgagtatggcggctccttgagcaccctcacacgcggcgtttgttgtcatgcgtttgtgtgattaccgtaggctttataatttttatttgataatttatattcatgtattcattcattttccaacttgctttctccagttcagagtggcaggtgaccagggcccatcctggaggctcagtgccaaggtgggcacccgccctggataggacaggcctccatgggacacccacactcactcggactaggcccatgtagacatgccgtgaggctgaggtgtatacttgggatgtgggaggaaactggaggacctggagaaaacccgcgcggacctggggagacctcctcaatgctccctagaatgaaacgatgggatttgaggacctgctgtatttatttgtcccaatccagcggccctggccttcagtgcacagtagtccctgctgctgggcacacatcccctcatgctcagtccattgaccaggactgggcacatggcctcacctagctgcgggcagtggcttctgccctggggcaggcagctgctccaggtctggagatgagccccacctccaggtgcagctgctccaggtgtggaaacggggctctacctcgtggggagcgtccgctgcgggccacaaccttgctgggaggctgcgggagatggggggtaagaggggtgatgttgaggctttccctcctcggcagtgaccggcgcagccctccccagtgtagctcccccctccccacccctccctccatctggaacacagcacgggggctgccctccagccctcagtgtgcagggcttgcacaccttggcttgcagggcatttgggggatcccagtggggcaactgccagctggagagatgctggtgcccagccgtgctgctcctgggggcaggctgggtaggggctgaggggctggagtgagcggtccacagtcatccaggaacaacagggctctcacctggcagggctcccaggcacgttgatggagggagggtttcctcagtcctctcccccagcccttactgggcagtacccccacccaccatactgtctcttgcctgggtctcaggtggtcggcgctgtctggcccctgcctctccctctgtcccttcagctgaagcgggctccacgccatcccaggacttcccgcgcggtctgaagcacagccacatccggtctgaccgtccctcacccctccctcacccctccctcgccccccctcgcccctccctcgcccctccctcgccccccctcgccaccccaggaggaaatagaggctgagtgtccgtgccctgcagccgagcagccacccttgcctttggccccaccttcgcctgcctggcggccgtcctgtcacctgtcattcagcccttgctgtctgctgggcacgtgccctgcaggtggggtgcacggcaggcccatgagtgcccaccatgcctcgccattcaggaagccacccaggtgctccgggcggtgtcagggcagggtgcgtctgtgcggcgtttgcatgtgtccaccgtcctgaccgggggcagggccacgtcccacacatctttctgcctaacttatgatgtggcaaagacacatcccgatacctctcccgggtgggcctgtgagctgggctctgtgacgccaaggcccaggacctgctcagccctgggaagatggaactggaggggaccttgagatggctggcccagccccttgtcttatagacagggagacagcagaaagggagatggagtcaccggccaggaccccagctatgagtgggagctggaccaggagttgagtgtcctgagccacctcctccctgtgctgggtccactctcagaaacactccaggtctggaggcagacctggaggcagggcagggcagggcagggagggcagaatggctatgatgtggtgaggctgtgtccccacccaaatctcacctcgaattgtaatccccaggtgttgaaggagggaggcgattggatcatgaggcggtttcctccatgctgttctcatgatagctagtgagttctcatgggatctgatggttttataaggggctcttcccccttcgcttgctcttgctctctctctcctgccaccatgtgaagaaggtgcctgcttccccttcagccatgactgtaagtttcctgaggcctccccagccatgcagaactctgagtcaatgaaaactctttcctttagaaatcacccagtctcaagtaagttttttttttttttttttcagacagagtcttgctctgtcacccaggctggagtgcagtggcaccatctcggctcactgcaacctgcgcctcctgggttcaagcgattctcgtgcctcagtctcccgagtagctgggattacaggtgcctgccaccactgccggctaatttttgtatttttggtagagatggggtttcaccatgttggccatgatggtctcgaactcctgacatcaggtgatccacccacctcggcctcccaaagtgctgggattacaggcgtgagccaccgcacccagccagaagttctttatagcagtgggaaaatggacgaatccaggcttgcatcagtgttccggggcagcccaacaaagtaccacaaaatgaggggcttaaaccatagacatgtgctctgtcgtggctctggaggccagaagtctgaactccaggtgtgggtggagccgcgccccctctgagattctaggagagttcccttcctcgcttctgccagctgctggtgggtgccggaagccttggaactctgatctgtggcagcctcactcctacctctgcctccgtgtttacacgacctctctgtgtgtgtgcgtccaaatttctctcttcttacagggtcgccagtcattagatgagggcccaccttctccagtgtgacctcatcttagcctcattacatctgcaaagaccccacttccaaataagatcacatccgtaggttttgaggttaggacttgaagacatcgctttgggggacacagttccacccaatgcaggtccttggtgagccaggtagaatgagctggtggtgtgggcagtggcttgagagagccgctatgccagtagctttgtggaagtttcggggccgtggtttctctgagaccgtttacataggttctcagtaggggctggaagaggctgtgggcgtttgtgtcagggtgactgggtggaggtggccggtctgcatgccggttcatcaaggggaggatgtcccatggatcaggggccagaatggagccagctgcctccctccggctcccagagccaccccaggccatgcacaactttgagccctcagaggtccagttcctcggtcggtctttcctcagcttcctcctctgtaggccatggagctgaccatcctgcctctggcagctgtggtgctgtttaggggaacggtcattgccttcatctccattttatagttggggaaactgaggctcagaggaacgaaaactctgggtaggagcacagaaagagcagagcatgggcggtggacaaagagtcgccgtccctgacagtctcgcggtcggaccttggtcacgtgtggtctggggctctcgcctcctcccagctctgaggttctctgcatgaactccaaggaaacagcctgttctgggatggcaggagctggtggacttccaagttagaaacacaaagatgccatgagcttagggttctggaaggccctggggtgtccgctaggtgtaaggtgctggtggccctggtcaaacaacccctaagggtgggcagagtggggggcaggtgggaaaaacagattgacactcccagattggactccaggtgacggcctgctggtgcccacctggctagaactttctattcctttttgtccaggtctcatggaacaaggaaatcaaaaaaacacccgcccgtgcacaaatggatttcctgaacccttctgtgcgccagtccttggggacgcaaatgtgaatgaggcggcgctctgttgaatttccgtgcccaaactcaccaacgtgcacagatactgatgtgggaacacccgctataaggtggcctggagcagtgaagaccctgctctcttgtgaactcccgcaaccatggccagccccctggggctcccagaccttggcagtcagcccttgtggtttttaaaaaatttatttttatttttatttttagaggcagggtctcattatgtcacccagtgatatggtctggctgtgtccccacccaaatctcatcttttattttttttttttttgagacggagtttcgctcttgttgcccaggctggagtgcagtggtgcaatctcggctcaccgcaacctccacttccagggttcaagcgattcccctgcttcagcctcccgagtagctgggattaagggcgcagaccaccatgtctggataattttttttgtatttttaatagagatggggtttcatcatgttggccaggctggtcttgaactcctgacctcaggtgatccacccacttcggcctcccaaagtgctgggattataggtgtgagccaccgtgcccagccccaaatctcatcttgaattgtactcccataattcccacatgttgtgggagggacccagtgggagataattgaatcataggggtggtttcccctgtactgttcttgtggtagtgaataagtctcatgagatctgatggttttagaagagctttccgcattctctcttgcagctgccgtgtgagatgtgccttctgtcatgattgtgaggcctccccagtgagcccattaaacctctttttcttcccagtcttgagtatgtctttatctgaagcatgaaaacggactaatatacccaggttggagtgcagtggcgccatcttgacttactgcagccttgacctccagctttcaaacgatcctcctcccttggcctcccaaagtgttggggtcacaggtgtgaaccaccatgtccagccagcccttgggttttgagatgctcaagttacaggtgagaagtgctttgtttgttccggaatctgtgtcctgagagggttaaagacaagggctggccagcccctagaacctggccgtgtcaccaggggagctgtggaagcaggagggaagcaggagggaggcagcagttctgtgccgtggggcaccttgggcttttcttttttctttctaatagagaagcaacattttgaataaatccacaaaagcgtagaagatcatctcatcggtttctgtgtgtgaagtttcatgcttatctaactgcatttaggaaaattcacgtgtacatttttcccaaggggagcgagaggatgtgagcgttctacttgttcatttcatatctgcttttacaaattcatagggagggtgaggaaggagctgtggttctcattgcgactgatgtttgattatttgattcaggaatttcacttctgggaacttgacttagggaaatgctctcagagacgcgtgcgatgttgtttgtaacaagcacatgtggagatgtcccgggcccctcatgaggcggctgcttgtgtccgtttgtacctcttgccagctgtgcagtgtcgctcagctcccagaaggagggaggcaggtccaggcattgatggttagttttgtttttttttttgagaaggagtctccctctgtcacccaggctggagagcagtggcacgatctcagctcaactgcaacctccacctctcaggttcaagcgattctcctgcctcagcctcttgagtagctgggattacaggcatgcaccaccatgcctggctaatttttgtatttttagtagagacagggtttcgctgtgttggccaggctggtctcgaactcctgacctcaagtgatccacccgccttggcctcccaaagtgctgggattacaggcatgagccaccgcgcccagctgatgattagttttatccatgttcttcctgctgcagctcacccagaggccctggtggggcaagaacttggctggccagggttggagcaaaaacaccagccttggctgtgggtgaggcaggagtgtggccgtgcaggtgtggcttcctcgccgcatctccagggcgctttccctgtcctgtgagctccttgagggccgaacctgggcctgtcagttctgggctacctccacttcccagcaggccctcaagaagggttccctagatgtggtctattcccacgggagactatcattcagccgtcgaaaggaagggaattctgatgcaggctagacaggaatgaggacattaggctgagtcaaagaggccagtcacagacgcacaagtacggtgacctcccctttgatgaggccctggaggagtcagattcacagagacagaaagcagaatggtggcaccggggctgggggatggggaacgggggcggagtgttgaacggggacagagtttgctttgcacgatgaagagttctgtggctggatgtcagggatggttgcacaagactggaatgtacttgatgccactgaactgtgcacttaaaaatggtcatgatggtaaattttacgttatacatgtttcaccatagttcgaaaaatactttaaaaaaagcaccatgtcccttggatttagtgataccgacccctctttgtccctctgcttcccagtggtttcttcttgcccctgggatttgtagggatgggttgcccctccacacctgtgggtgtttctcgtaaggtgggacgagagatttggaaaagaaaaagacacagagacaaagtatagagaaagaaataaggggacccggggaaccagcgttcagcatatggaggatcccgccagcctctgagttcccttagtatttattcatcatttgtgggtgtttctcgaagagggggatgtgtcagggtcacaagacaattgtggggagagggtcagcagacaaacacgtgaacaaaggtctttgcatcatagacaaggtaaaggattaagtgctgtgcttttagatatgcatacacataaacatctcaatgctttacaaagcagtattgctgcccgcaggtcccacctccagccctaaggcggtttttccctatctcagtagatggagcatacaatcgggttttataccgagacattccattgcccagggacgggcaggagacagatgccttcctcttgtctcaactgcaagaggcgttccttcctcttttactaatcctcctcagcacagaccctttatgggtgtcgggctgggggacggtcaggtctttcccttcccacgaggccatatctcagactatcacatggggagaaaccttggacaatacctggctttcctaggcagaggtccctgcggccttccgcagtttttgtgtccctgggtacttgagattagggagtggtgatgactcttaaggagcatgctgccttcaagcatctgtttaacaaagcacatctggcaccgcccttaatccattcaactctgagttgacacagcacatgtttcagagagcacggggttgggggtaaggtcacagaatctcaaggcagaagaatttttcttagtacataacaaaatggagtctcctatgtctacttctttctacacagacacagtaacaatctgatctttcttgcttttccccacaggatttaacaacaaatcctaatgcacgtgggggccagcggcagtgactgtagtccccttggcaggcgaaggcctgtgagtagccagtgctatgtctggcattctaggcagctcctggctcccgggcggatcctcctgttgcctgctgggccagcctcaggtcggcccttccagctctgtaaaactcagaaggcctttagggcaggcactgtgccactgaccccctctctgtgtcccagggcccggtacaatgagatgatcatggaattaaacagaacagaaccatgaggtgtccaccaggccatgccaggatgcactggcttcacctgtgattttggcaccagtttaaacagtgtcacttcattctgtgcttctcctgattagtctgccttctggccgatatatccctgggaggcaggtgcagacccctcttgactatgtactgtgtgcagttttggggacagagctctttatgtggccaaggtctggctgggcaaggtgtctcatacctgtaatcccagcactttgggaggctgaggccagaggactgcttgaggccaggagtttgagaacagcctgggcaacatagcaagaccccatctctacaaaaaataaataaaaattagccaagtgcgcctgtggtctagctactccagaggctgaaatgggaggatcacttgggcccaggaggttaaggctgcagtgaactgtgatagcaccactgcactccagcctgggcaacagagtgagaccctgtcgcaaaaaaaaaaaaaaaaaaaaaaaaaaggggccaaggtcctttcccaggacgtcaggacgaatgtatggagcagcagcaggggtctcaacgagtgccgcgccgtttccagccgtgcgcacgtccctgtggctgccgcaaggaacagaacgacttggtcatcttgcagtggaagtcagaagcctgaagtgggtcccgctgggtgataatcaaagtgccagctggcctgcgttgcttctgaagcctctaggagagaatccacctccttgcctcttccagcttttagaggccgccctgttctgtcataactcaaggccctgcatatggcacaggtgtgactgttcgcgcccgcagctccttcaccaaccctcctgccaccctccttccctgctttcctgtaaggacccctgtggtgacgtcagggccacctgggtatccagaagcatctccccagctcgtgatccctcacttaatcccatctccagctgccttttgcagagtaatgtgcacattcatgggtgctggggacggggacatggacatcttggggtcggggtcattattctgcccaccacagccaacaattacaatcaatggggatgagaactggaaatggtcctgtatgattctcttgctgccaggcttgagagccagccaggagcacgctgggggccgagcgtgggaacgtgccacatgtgacggtgctcccacggctcagcgctgcttccagacacagtcctactagttggagcctattttggccacagctctcacctgcgttttggtggtgggaggggtgtttctgggttccaggtgaagttggttacacctcctgggtgttcaggcatcaatgttcaccttcatcaaacgtttaaaaaattgtggttaggctgggtgcagaggtccatgcctgtaatcccagcacttcgagaggctaagggggggtggatcgcttgaggtcaggagtttgagaccagcctgggcaacatggcaaaactacatctctaccaaaaatacaaaaattagctgggtgtggtggcgcgtgcctgtaatcccagcactttgggaagccaaggcaggtggatcacctgaggtcaggagtttgagaacagcctaggcaacgtggcaaaaccctgtctctactaaaaatacaaaaattagctgggcgtgttggcacacgcctgtagtcccagctacttgggaggctgaggcaggagaattgcttgaacctgggaggcagaggttgcagtaaaccgagacagtgccactgcactccagcctgggtgacagagtgaaactccgtctcaaaataaataaataaataaattagctgggcatggtggtgcacgtctgtaatcctagctactcaggaggctgaggtggaagaattgctggaatctgggaggcggaggttgcagtgagctgcgatcacaccactgcactccagcttgggcaacagagtgaaactctgtctcaaaaaaaaaaagtggttaaatatatgtaacataaaggttgccattttaaccatttccaagtgtacagttctgtggcattaagtacattcacaccgtttgcgaccatcaccgccacgtcacggtcagtttatgttatcttgattaggtgccagtccccagggactcaaacatgaggcaaagtgttgctgtgaaggtgttttgtgcgtgcgattaacatctacaatccgtccaccttgagtaaaggaggtgatcctgaatgacatgggtgggccttgttcaaacagtcaaaggcctgaagagcaaaaatgaggtttcctgagaagaagaaattctgcctcaaaactgcaactccaattccttcctgagttttcagcctgctggctcatctatcaatgttggatttgccagccaccactattgatatcgatatctatatgtatttcttaatatctatatttatatatcttattggctctgttcctccctgcctgtcacacagtctgtctgcttgccagtctctcctatgggaatgtagccccctgaagtcaggaactgtcttttttatagctgtatccagtcagctagtgtggcacacagtaggtgcttaataaaaacatagctactttctaattgctctggcgctcacatggaagtggcttgaacagtagacgcatgggagagagctgttcctggcatcctgatggcctggtgtgcatctcgggtaattcatacagtatcttacgtttgccctctccttattaatgtcacccagccctacctattctaggcagctgcgttcactctggtgaaggggataagttctctgggaaccttcatttgctgagtcagtgtggccacctagggtttctgcttggatgtgttcctgacacatccgccccggtctccagccctgggtggacagctctgcgtaagtgttcccattgctcctaggaattcgctctagtctcagacccaacacattcatccatccatccatccatccatccatccattcaacaatctgtgttcaatgcctcttcccatttagcactggggatacagtggtgaacaaaagagatgacaattcctgccctcatggagcttaccttctagtagagaaggcagaccatacacaagataaataaggggactatactgaatgttagagaataacgtgtgttcaggaggaaaagaactgccagaggagaggagggcgtgagatgtgtggaagtcctcatgcattggtcagctcttgttatggtaatgctacataacaaacacccctaagttccagtggcttccacccattctcttgggtctatggtttgcttgggtggttctgcctcaggcattgggttgggttagggccactccatgtgttacccttctgaggttcagacagagggaacagcgtctatgtgggcacagccttctcatggcgcagggctcaaccatgcacgcacattgaatgccttcagccggacatggccaaagttatgtctgctcacactccattgcccaaagcaagtcacaagtcgcaacaagtcagaaggctggggacacacactctgcccatagcgagccatggcagagtcactcacaaggtgggcgctgtggttcgaatgcttctctcaagaagcatgtgttggaaacttattccccaaggccacagtgttgggaggcgggcctaatgggaggtgattcggccctggggtgactaggcgagaggcggggccctcatgaatggatgaatgctataatcgctagaatacgtttgttatcgtgaatctgggctccttacgaaagggtgcgttgggtcccccctctctttgctcttccacctgctgctgcgggatgacacagcaggaagtcccacctgccaacttctcagcctccagaactgggaggaaataaagttctgttctttataaagtgtgtagtctgcggtattctgttatagcagcacaaaatggattacgacagcgggttttcggtacagacctcaaggaaattagtgcaccagccatgcagagaactgcaggaagagctctctgaggtgggaacaggccatgcaaaggccctgaggtaggagggcacatgcgcctcggagaaccccaaggggccagcatggtaggagcattgggaacaaggggaggctggggctaggtctgtaaggcactgcgggtcaccgtaaagaatttgacttttcccctgggtaagaagggaaatcaggcaagatgtggagtccaggaggggcctgatgcaatcctcgttttaggaattgccccagctgctgggtggagaatagacttggaggcaaagccataaatgggaacccagggaggcacgaacggcaaccatccaggcagaggacagtgctgtcttggatcgaggtggtggggtggtgaggaatgggtaaagtctggacagtttttgcaggtagaggtgacagaatttgctgataaatcagggatggggcgtgtctcagtccgcttgggctgccgtacaagataccacagactgagtgatttaaataacagaaatttattatctcagttctagaggctggaagtctgagatgaaagtgtcagaagggctggctcttcctgaggcctctctctgtggtttgcggacagccaccttctccctgtgtcctcacagggcctttcctctgggcacacacatccctggtgtctctttctcttttcttataaggacgccagtcctattggattagagccccctgcttatgacctaatgtaatgttgattacctcctcctatctccaaatacagtcacactggggttagggctgtagtaactcttgcctgtaatcccagctactagggaggcccaggcacgaggatcacttcagcccaggagttcaagtctagcctgggcaacatagtgagaggccgtttcctaaaaaaaaaaaaagggttttttcgtttttgtttttgtttttttttttttttcgagaaggagtcttgctctgttgcccaggctggagtgcagtttctcaatctcggctcactgcaacttccgcctcctggggttcaagcgatcctcttgcctcagcctcctgagtagctgggattacaggtgccggccaccacacccggctaatttttgtgtttttagtggagacagggtttcgccatgttggccgggctggtctcaaactcctgacctcatgtgatccacccgcctcggccttccaaagtgctgggattacaagtgtaagccactgcgcccggccaagagtgaagttctgatagctggggtaagaaaggccgtgggaacagccggtttcagacacgctgggtctaagacgctgcgtctggcgctgctcggcatccaatgggagccgtggagaagccaggcgagtgcgtagggcggagccagcgcacaggaaataggacgtgatgaggtcaaccggctggtccaagtgtggacggaagtagaggatgcaagcaccgagccccggggcccccagcattggcggggaggagctcgcggtgcgggagaagcaggggaccgcgcatcctggagaccaggtggagccagtgcgcccggaaggggcgtggcccgctgacagccgcccaggaggccgggggaggcctggagccgagggccgcgcgtggcaatgtggagagacattttggtggagtcatggggccacagcctgattggtgagaacaggaagggaaattgcagatgggcctgggccccctggctcccgcatactccaggaccagggctgagtcatcgttcaccgtgtgtgaccagggccccgtgtggccggctgtcactcggtatccagttaccctgggcagaccactggcggcaccccccagccagaggccgcagcaacacacacgcctgcaggcgaccaggccggactgcatgccccgtgggggaactgagggcgtttcagtaacagagtgttaggggacacgggttgggtggcttggaaagggcctaaggtggggtttgttttagattggggtggtgagggcgcaggggcccggtaggattctctaacagggcagcagccactcatttagcaacaggagaggcgtccagcgtttcgtgggctgtgcggtgaccttgcttttgtgcttagacacgattacgggtggccttgcttcatctccttctgccatggtctcgtggcccctgtctcagctggcgttccgggaggttgtttacgtccaggaggaaagcaaaagcctggccctgagcatcagggtggctctggacgccagggctgtactgtgttctttctcgacacgaatgagtttctggacagttttcccggctagtgcagacccacactgactgaaaaccgaaatctttgcacatgagaaaaataactcccatggcaaggcgtggcggctcacacctgtaatctcagtgctttgggaggccaaggcaggaagatcgcttgaggccaggagttcgaggccagcctgggcaacataaggataccctgtctgtacaaaaataacagattaaaaaaaaaaaacaaaataacacccatggtgcagccatttcttggggggttatggtaattttagtagcaatcatctaagaagaggttttgtttcctcaacccgaatgcgctccctttcctcaaggctctgagagcagcaggaaggctcaccttccttgtttagtgaggtgttaaccttcctgggttcaccccggtgcaacggtttgtgtcatgcatcaacttggctgggccacggcgcccggtttggtcaaacgcccatctggatgttgtcgtggacagctgtgtagatgtgattcgtatttaggtcagtagacttttaaagctggtgaccttccgtcgtgtgggtgggtcttgtccggtcagccagaggccttaagttcaaagactaagctttcctgaagaagaaggaattgcacctccctcaagactgcaatacagaaaccctgcctgggtatccagcatgccgccctgcagaacttggacttgagacctcagtcagctcttgcctgagtctccagcctgccgcctgccctgcagattttggaagtgacaacccccacaattgcccgagccaatttcttcaaataaatctctttccctccatccatccattcatccttctgtccacctatcctatcggctctgttctgtgggttctgttcctctgggaaccctgacagatgcccctggtttggtgggtgtcatggtctctggtgctggtgctacaccctgttgctgccctggccagaagcctgcaggtgcctctgagcccacggaagctaagggggccgtttccaaggggccgcattccccgcctctctgctcttggggcttcggtccattcggcccgcgtgagagctaggagtgccacagtcgacatcctcagtgggattggtaccagttgcctacaccagcaaccctctcatggaggagccttcggtggctttgctccttaccccacctcctgccccctcactcactcctgcttcccaggtcaccttccaaaggccccacacctgccttctcctctccatcccccgaggtggggagccaacacccccccagcagcccacctccctgctttcccttggaagcactgctctccaggtgtccacaggcagcaggggttggggggctccttagcgccttcgccttgaccaggcacgtggagtcatggatccagatcctggctctgagagcgcctgcttctgactgcaggcctggccgacccgtgtcattgcccctcgaggcagggcggaacctctgggtggggaaaggtgggccgtgctgctcaggaaccaaaggcaaaccagccttgtcctcacgcccagagctgtgtccagcctcctcggcgagcctgggttgattccaggagagactaagcacccactgtgtcccacgccttcagccacgtcgcccgtcacctgcggcctgagtgttcccttccagagggcgtgaaaaacaattgtctgctgagaggtctttgaaggggaaacaagtgcccggggcaggccaggaccgcagactggatcttgaggactggcagcgcagtgttttgtgcagaaaagctaagggagatgttacgtgctcagaccacacgaagcgggcagcatcgtggcgggcttagcccgggcactgcctctcgaagcttccaggagcttcctgtaactttccggatggtgccgcagctgcttccccggcacccgggtcgccggggttctgactgcagagggtttctgtgcggggtgcggggtccactcaggtgaagcactcaggacacccctggtgtggtgacagcagcagcgtcactgtcacgggtgatgcggcaacagctcctctccctcctccagcactggcctaggaactgttcattcttctgaacacagcgaatgcccagggcttgagccccccttgcctgcctccagtcatttctgggtcaggtgggctaagaacaaacacacagtgagtgtcgagtcttgcccggtgactgactgcagaagcctctgtgtggcttcgctcccggatgtctgaaggcccctccctgggctgcacggcggctcctgcggggcactgcgggaagagccccagctctccagctaaacctgtgggatgcggccatggtgagaaaaggaaacgaccatcttcacgctgacactgagcaaagaaaagataaaactcatagcaaatttaccatgttagatttacaaacgttagcagtggaataaatccagaggaaagaacaaaagaaagattcgagaccagcctggccagcagggtgaaaccccatctttactaaaaatacaaaaagtagccgggcatggtggcgagcacctgcaatcccagctactcaggaggctgagccaggagaattgcttgaacccgggaggtggaggttgcagtgagctgagattgtatcactgcactccagcctgggtgacagagggagactccatgtcaaaaaaaaaaaaagaagatatgagtagaaatgaatgaaataaaaaacgacatactgtagagaggatcaacgaagccaaaatctaataaaattgataaaccgccccaattaatcacgaaaaaggtggagacaaataaacaagagggatgagaaaaaaaaaaacaaaatgcccaccacgctcgtgaggccggagatcaccgaggaatccgagcacccgggggacgctgcatgcccgtgagtgtgatacctacacaaaggaggattttctaaaaaccagaagtcctatggccattaaaaaatggaatcagtaggaaaaaaaaaagccccaaagagaaagtaacattcctagatgttaactggtgagtttctaccaacaagtaagaacagtttcagttttatagaaattctcccaaagaaaagaaaattagaaaacatgcttccctcacctcccgttttatttgtttatttttatttgagacagggtctggttctgttgcccaggctggagtgcagtggtgcaatctctgctcactgtaacctctgcctgctgggctcaagtcatcgtcccacctcggcctcctgagtagctgggattacaggtgcgtgccatcacatccatctaatttttgtatttttttgtaaaggcagggttttgccatgttgccttggctggtctcaagcttctgagctcaagccatccaccctcctcagcctcccaaagcactgggattacaggggtgagccgctgcgcccagcccaccccccgttttataaggtggttataacgttggtatcaaaaccggataagcacaatacaagagagagctacaggccagctgcattcagagcacaggtggaaaatcctaaacgtaacagagctgaacccatcgtcccatctagcgctcctgggaggcaagcctgggctggggtgcccccacccatcctggtgagagcctcgggctgagctgccttgatcccaagggttctgcttccccatggttccccgaagggcccagaaagacacgtcagaaagttggggacggggtgagggaggccatcatcctttggagcagatttggccacctggagatgagaagagccagttctgcaaagtaccctccctcccttcctcacctccctttcacttccctggggtggtacctcccaacaaaacatctgcacctagacgctccccaggccccctcttcttggaaacctgggctaagacagtaactaagctgggttggttccaatcatgtgagattggtttagcattagacaactgattcataaagttctttgtattaacatatcaaaagaggaaaagacgtatgaccttttcaggaacgcagaagcaatttcagaaaaaatgatacctacgtaacaaccagagcagtgagcagattctttttaggtcatgatgcaaacacatcaactgtaaaagaacatatttgagacaatcagggttatctgatgagggactaggttttagatgacatcgagaaattgttaggaatcctgtcaaacgtgagagggaatttgcgcttatagaaagaaatgttcgatttgtaggagaggtacctgaagtgcgcgggggtgaaatgacgtggcgtctgtgctttgctttaaaatactccagtaaagaaaaaaaccaagagaagcgggaagcagggcaaaatcctcctaattgttggatctggctgaggagtatgtgaagggctcattgttccatggtctctacttttgagactgtgtaaaaattttcatgataaaaataaactcaatgaagtagcatttgccgccaccgtaaaagtaataccccgtgatgggcgcaccaggtgctggcccgcagggggagggcgggacgtcactggctctgtccccgtcacccatgacctgcacgtcctggcagtggtgagcgcccagtgtgtgctgtgggacagaattatctctaaacccccgaaagaggatcctctccccaacttaactccagcctcggagggcctcgggggtctatggcacactctccctgctggctttgttctggaaagggctggcgggacatgaccggccccacgttgcactctgagggcagctcgggggtctgcaggggaccatcctgtgtaacctgctgacctcgaggagaagcagggcgagggcttagctcaggcacattccccgctgagccacaacaatgccccatccgccctacacaggcggatttgtgtgtgagccccgcggggccctggagtggaaaattgcagcgccagcctttgtggggcagactgctggcgttacgggaatcctgtagatgaagtgaatgtggcctttgtgtgaggggctggcattgagctcgggtgcagtggggcggcaaatcgctgaggacaggcttaagctgggccgcggaaacaatgccggggagccacggaggagccatcgcagaggccgggaaaaacctcccgacagggctcgatctgtagagatatttgagaaaaatgatctccgagacagtggcttacacacccccacgcatacacaccacggacacacaccacacacatcacacacacaccatacactatagatataccacacacacaccccaccacctatacaacacacaccacacacacaccatacactatagatgtaccacacatacacaccccacaccacctatacaacacacaccacacacaccacagacacacaccacagacacacaccacagatataccacacacacaccagatacacaacatacacatcacacacaccacacagacacacaccacagatactccacactgcacacacatcatacaccacacacacaccacacacacatcacacacatcacacacacatcacacacatcgcacaccacacgcaccacagaaacatcacacaccacacatataccacacaccccacattccacacaccccacacatcacataaacaccacacacacaccactcacatcacacaccacatataccacacacatcacatatacaacacacaccacacacacaccccacacatcacatatacaacacacacagcacataccagacacatcacacacacacacaccacacacggtacattgtacaccacacaccacacacacatcacacacacgtcacagaaaccccacacaccacacatataccacacacacacaccacacacgtcacagacacaccacacacaccacacccatcacagaaaccccacacaccacacgtataccacacacacaccacacacgtcacagaaaccccacacaccacacacacatcacacaccacatatccaacacacaccccccacacaccacacatatcaaatatacaccacacccccacacacgctcccagaccagttggagccctgccctcgcaccccagatcccgcacatctgtccctctgttcccttggcctcccaccccttctccaccctcaggagccccatgcagcccacactgggtcctgcccagcccctgggccggaggggatggtccccctgcgccgtccccagcgctgcccaccctgcagaacgtcctcaggcggccgggctccacacctgcgacaggcccgaggccccggctgcaggccccactcggctgcagttcccgtcgaggcagccaatggccttgaggcctctcccaggtgggacggcccctgcgagggctggtgggcacaggggccagccctgccccatggccttgctcagctgtgggaggcgtgccttttctttctctgatctctgtgaaactcttactttttcttccccggggcgggggggtgagggtcgggcctgtggtggcactgcgctgagccaggcatgctgggctggcgtctcccttgctggggcgcagatggcctaggtggggcccgtgtggaagctgcgtccatctgactctgccgcctgtgcggtctctgcatctgtgaggggggacccagcagcagtggcccagggtggggctgggactgagggtcaggccggatggagctgtgcggcggcacctggcccacattctccctgcggccaccaagaccccaggtgggcactggcaccttgggctatgcccaggtccccaccctcagccttctctggaagctgctggctctgcggtgaccccctcccgcacccccttaacccaaggcgggtcctttggggcccactgggtgctctggctgggtctgccctgggctggtcactctcgccagggtctcggtccagggcacaggcaggagtgacggttactctccaggaggccgggagaaccaagagacatccaatgaggaagggctgcccatgcttaaagatgtccagtgaggaagggccacccgtgcccagggacatccagtgaggaagggctgcctgtgcccagggtgatcatgtttgcacagaccccggtgtgcctgcggggctgagctgtttgcctacccccatgccctccccaggtggcaggctacaagaccagccttgttcttgcccttcccagccctggcctgggagtcagacacttgactcgtagccttgacttccgtgccaggctgcctggagaggccagcctcttcccggaggggtccttggggcctactgggcagacctctctctccacggcccttcctgtccctaggcggacctttccctgacccagctcacaccagcctggggcctgtgtgctggggccgggctcctgcaggctgtcccgggcaggcgccagggggccctgtgccactgggcggtggtgtgggaggcacaggaagaagcttacctcacccttcagacatcctggggggtacccttgtttcctatatcatttcaaccttggggtcccagcattgctggcgacgaggccggctgcaggttttggctcagaggcagactgagggcagcgccaaagggctccaggcctcccgaaacagcctcggtctgctcacacttggagggctgtcagaggccactggacgccagcaagaaggttgaggagccccaggccggcggtgcccccaaggtatctgacaccagagtgagtcacagttttgaatattccatcctccataccgcaaaattattttcaggatagttatgtaataatcacggataatcatgattttcttgattcattctttaaagcaattaacagaaaaagaatgcatttcaatgttaaagatattcaaattcagtgacttctttcatgcatgagctaacatctcagcttcagcaccacatctccgttttcgctctggtttcacagtctcacatttgaaacacagaataaaaacaccaagaggtcatgcagaatgacagaactgaaatacttccagctcggtttctttgtgagtgctgttgttgttatgtgaaatttctcgtttaagcacagaaatatgttgaaccacgggctggagatgagaacccctcccccagtgcacctgcacccgcccttcaaagccgctccaagccaatgcaggtggctgcgtctgcagtgtcgggagtggccccatgactggaagttcactggaaaatttccactcagtaaatgtttagaacaagaaataaaactgtgctaatgtgaagattacagaaatatagtctatcctcatgactcatgcattccagatttgggaattccctgtgatgtcagtgtgccagggaccacagactggatggcttaaacaacagacatttgttgtctcacagtcctggagcctggaagtccaagatcgcagggtcggtggggccggttccttcctgtgcttgcagacgggcctcttcttgttgtgccctcatgtggactttcctctgtgtgcatgtgttcttggtgtctctttttggaatttgtccagatttcctcctcttttttttttttttttttttttaagacagagtgagactctgtcgccaggcaggagtgcagtggtgcaatctcggctcactgcagcctccgttttccgggttcaagtgattctcctgcctcagcctcccgagtagctgggactacaggtgcatgccaccatgcctggctatttttttgtattttagtagagacggggtttcaccatgttgtccaggctggtcttgaactcctgacctcgtgatccacccgcctcggcctcccaaagtgttgggattacaggcgtgagccaccgcgcccagctgatttcctcttcttataaggatgccagtcacatgcattagggctcacccaaatgacctccttttaacttaatttcctgagagatcctatctccaaatacagtcacactctgaggtcctggggttagtacttcaacacaggaattttttgggaactcagttcagtccatgacacctacttggtcaaatttatttgtaggctgggcacggtggctcacgcctgtaatcccagcacctctggaggccaaggtgggaggatcgcttgagcctaggagttcaagaccagcctgggcaacatagcaagcaagaccccgtccctacaaaaaaattaccaaaaaaatttatttgtgaccccaaatcaataattgcagagttttcctggtcattcacagatgtgtagagagtgccgagacatttgtctccttacacatattcctgggtgaggttgaacaaggcagcactatgccctcttgtttcagcctcaggcggtcaaccagtatcctttttgaggtctatttagtgccatgatttttgcatttcgtgtgttttgtttgtgattttgctttttaaaacgtccccaagcccagtgctgaagagctgtgtgcttggaggcatttttaagtaagtggattaagcacttcagttaaaatgcagaaattgtccaaacagattaaaaacattatctaattatatgctgtctacaagagacactttagattcaaagacacaaatagtttgaaagtaaaagatttctaaaaatatgccatacaaatggaaacccaaagacagttttggttactgtttggttactcttcagctttgtgcttgggggcattttaaacagcaaaatcacgaacaaaacacacaaaactgcaaaaggtaagcaagctgcagtgcatctcacagaggaaacacgggttagagaagcttccttcgggcagagctacagggctgctggccatgagttcagtgtttagtgaatcaatgtttatagattcagtaaagcatcttttttttttttttcttttttggaacagagtctcattctgttgcccagtctgaagtgcagtggcacgatctcagctcactgcaacctccacctcctgggttcaagcgattctcctgcctcagcctcccaagtagctgggattacaggcctgcaccatcacgcctggctaattttagtatttttaatagaaatggggtttcaccattttggctaggctgatcttgaactcctggcctcaggtgatacacccgccttggcctcccaaagtgctgggattacaggcgtgagccaccacgcctggcctcagtaaagcatctgtacacagaaacactcataagacaaatgatgcattgctcagctgatgagaacattggggccagaggctcgcaggaccctaagcctgtgtctcccctgggagccatggttcagcagtccaggcatcactaattcagtgctcacagcagctttatagaacacccctacctctagaaacaactgctatgaatgcagcaattgctagaacttagcccagcaaaaggggattttgtgctgacatgatttgcatggacagtggctgggaatcaggaaaagaacactgacttgtctttggtttcattctggtttttcattttccgcagacatcatatccctcagtgcactggctgtcacctccccctgcccgccacctgcacactgtggctttgaggcagcatcttcaacacaaatttcaggaggagcccaggtccagagcaaaagggtcttgtttccccagaatccaggcgaatggcgcagggctctggcaggcggatgcactgacatcagcgtgcatttacttgtttgttgcttgtctctacccaagagaatatcagctccagaaaagcagggactttgtttaacacagcgttaagagacaggactcgaccagtgtggatcaattaagtgaggatgtttgcacagcaggctccgggccagcgagtgggggttaaggctcctgaaagtagccggctttgagatgtggtgggggtgagcctgaattatccaggtgggctgagagcgtaattgccaggtggatgtgatgggagagacctcaccgcccaccactgcctttgaaggtggaggaggggccacgagccaagaaaggcaggtgccttgagatgccagagaaggcaagaaacagactcccctgagcctccagcaggagccagccctgccagtgtcttgctttaagttgaatgagacacatttcagacttgtggcctccagaactgtgagagaagacgtttgtgttgttttaagccactaagtctgtgattggtacatcagccacaagacactaatacaacacctaaactcggggtttgaaaaggcccctagggccctagagccctccctgcccccggtccaggccttcctgcttctgttgtgcagactcaggcgctggctcactcagaagccccctgcaggcccggccaatcctgtggcagagcctcgacgtcccacggcggcctctgagccgccaggccctacagcgtgtggtgaggggcgcaagaggtgtgagtgcctggaccttgctctgccccatgtctgaggaccttgccctgccccgtgtctgaggaccttgccccatcctcggcacccagagctgtgcagtccataggaccaggctggtgcccagccccaggttggtgcctcagctgcctcctcagcctgcagtctccactgtttgactgaccatgtgcagggccagctgtgaaggacagcacagctcctccctccctgccaagtgtcaggggcactaaaaacactgccatcaatgttctgatgtttaaatcatgttttgatgcaatgtttaaacaaatcaaaatgggtcgggcgcagtggctcacgcctgtaatcccatcactctgggaggccgaagcgagtggatcaccagagatcaggagttcgagaccagcctggccaacacggcgaaacctcatctctactaaaaatataaaaattagctgggtgtagtggtgtgtgcctgtaatctcagctacttgggaggctgaggcaggagaatcgtttgaacccgggaggcagaagttgcagtgagctgagattgtgccactgcactccagcctgggcgacagagcgagactccatctcaaaaataaataaataaaataaataagtaaatcaaaatgaatgcaaaaaatttgtggtggacaaactgtcaacattttacataaagccaggatgaggacgacggccttctccttttgcttcaagctccagcatggctctgcccagcactgaccgtgctcctggcctggctcgaccctccccagggccaagctccatgctggtttccatcccaaaggactcttcttccccctccctgtgccccgggaataggcagccagcacagtggggccgcccgctgcctcacccagaccctgccactgcttggatgttgacccccagactggaaaggtggctttaaacccccttcccttcttccaagccaagtgacctgggtgtgcggcttaaccttctaagctcccatttcctggtctatgaagcgggaatgatgctgggacctgcttcacagggtggctctgaggacccacaggcagagaggtctggtgtaggctttcgggggaagcacccatcactctcccagcgtttcctatctgcaccttaatttggcaccccagggaatcgctcctctggaattgtaaccttgcagggcaaaagctatcatttcaagattttttgggatcctgtgtccccggacagtgctgtaaatgtaggaggaagggtgctgctcatgggtgctgctcatgatggaggtgccccgtggagcacgcctcggagccccccctttcatccctgatcccatctgggatgtgtcaggtctgatccgcatacactggggcatctgacatttcatggccttctgagcccatgggctggagatgaatttgcaaagcccgggagtgtcctgggtgtgtgttcactccacacgcacgaatctgttagaggctgagtaggaactaggaggccaaagagaaccaggcaacttcccacagcctggaccgtacactagaaaagctagcctgggagagggggcatggcctcttcccaggctggcaggggggatgtgggggaggaccatgctccccagggccagtttaccaaaatatcaaaataccaaaatatcaaaagacttaaaactaggagtgagccaggtgcagtggctcacgcctgtaatcctacactttgagaggccaaggcaggtgggtcacctgaggtcaagagtttgagaccagcctggccaacacggtgaaaccctgtctctactaaaaatacaaaaataataataataataataataataataattagccaggtgtggtggcaggcacctgcagtctcagctactcaggaggctgaggtgggagaattgtttgaacctgggaggcagaggttgcagtgagctgagatcgcgccactatatgatctgggcgccactctgggtgacacagcaagactccatctcaaaaacaaacaaacaaaaccgggagtgcctggacacttagtgagaactggacaggggccatgggtcgaggagcaaaataatcaccaggacttgtggataacaggatcatgtgggtggtgggtccgcatgggtgacagggacgtggggacatgtcgccaccctgacaggagcagcccaactcaacagccacggcaggtcatgccacggaggctcgaggcgttacgtggggatgttacatcaaggcattacatcattacgagatgtaacgctcgaggcgttacatcgaggggatgatggccatggggctgggcgtccagggtgggccgcagagggaagctcaccacgtggtgctctcatctgcccacagcccagcccgtcttcctgttggaggcatgtgacccctggaggacaagcatgaaacgccatagggctcccccaggtgctggaattatggcaccttgcagcttcttctccacgagttttaacaagcatgcgtacttttgtaagtggtgagtgtaacggaggttcacagatgcactccgctttggaaaccagtgcactcttgcccaggcccggtgagactctgacgacgatgtgtctaacctctgtgtctaacgggggtgtgggctctccctcctctggcgaccatgaggaccaccccggcaggacaaggtgtgcagagaactagcatggtccctggcacgtagcccctgcccagtgactggcagatgagaagctccattgtcgccccaggcgagtatggggcacaggcgcctccttgggttgtctgccctcccgggagccccagggtgcccaggcgggcctcagctgagtccaggcctcggggacagtccgtgcagcccctcctggggctgggggcgggcacttgtcccagccacgtttctgctgactgagcagccttcttcatgagctcacgcctttccagagaaatcccttaatgcctccattctgctggtggcatatatagggagggctcggccttggctccacactgcgctgcccagaggccccgctgactcctgccagcctccaggtccccgtggtaccaaagctgaacatggatgtgaccatccagcacccctggttcaagcgcaccctggggcccttctaccccagccggctgttcgaccagtttttcggcgagggcctttttgagtatgacctgctgcccttcctgtcgtccaccatcagcccctactaccgccagtccctcttccgcaccgtgctggactccggcatctctgaggtaagacgtggcccgtggtgctggcctctcctcgctgctcagagggtggtggcctcggtgggtggagagcgatggactctggtcttgctccgtcaggcaggtggcctcgtcccacttcatccccttgcagaggctgggcgagagcctgtgtccccactgcagccacgtggtagagcttcccctggcactggggagagggtggacaagggagcagcctgaatccacctttgctttcctccatcagctcatgacccatgtgtgctttgtaaggcaccagccacatactggaaaccccaagagcagcccatccaggcatgcgtggtggcgaatgccagctcccgggttcctctggtctcctgagtcccggagacctgggagcaggtgggggtcatagtcctgaaagccagagagcagggcgttcctagcacctcctccaatgagctcggcctgcccacggctagcaaagctcttggcaagtttacttaggtgccctgccaaggctaaaaggacaggcaatggacgccccccccccccacccaaccacaggcctcctctctgagccacgggtgagcggtgcaggttctgctgttctggagggcctgagtcccacccagcacctcataaacagggtcctccccagggctgctgcagtaggcatcaatgccagggtgcaaaatgcctcagggagccaaggctgagccaggggagtgagaaggagcatgtggaagtgcgttttggagaggcagctgcgcaggctgtcagcaggctccggccgcttctatagacagcatgacaccaagggcagtgacctcattccacaggctgagtccagccagccagccaagcatcaccagccagacgattgaccctaacggaccaaccaacccgtaacgacccctcctaccataaccagtagccagccagcccataaccagccaacttatctataaccagccacctgaccatagccaaacaaccagccggcccaccagtagcattcagcccctcagctggccctgagggtttggagacaggtcgagggtcatgcctgtctgtccaggagacagtcacaggcccccgaaagctctgccccacttggtgtgtgggagaagaggccggcaggtgaccgaagcatctctgttctgataaccgggacccgccctgtctctgccaaccccagcagggacggcaccctctgggcagctccacatggcacgtttggatttcaggttcgatccgaccgggacaagttcgtcatcttcctcgatgtgaagcacttctccccggaggacctcaccgtgaaggtgcaggacgactttgtggagatccacggaaagcacaacgagcgccaggtgagcccaggcactgagaggtgggagaggggggcgagttgggcgcgaggacaagggggtcacggcgggcacgaccgggcctgcacacctgcaccatgccttcaaccctgggagagggacgctctccaggggaccccgaatcaggcctggcttttccccaagggaggggccgtgcccacctgagcacagccagcccctcccggtgacagaggtcaccattcccgagctaatgtggctcagggatccaggttagggtcccttcccgggctgcacccagccgtcgccagctccatccctgtcacctggatgccagggtggtcttagaaagaaccccaggaagtgggagtgccccgggtggccgcctcctagccagtgtacatcttcacatgaaccctacctgaggaagccagtccccgacggcatagctgcatccgcttggaatgctttacaggcattgacaccttcgcctcacagcagcactttggaaccagtgtcctcattattccagggcacggctggggaacaagggggtcctcagcctgctgggtcccacagctagtaccgggcaggtggacgggagcttctccccacagtcaccctgatgccccgctcttgctcggctggaggcctcggatctccgtggtgttgagggagccggggcactggagccctggtgacctgcatctcctggcggagccgggaagagctcatggactgtcacagatggacagtgccccgcgggggctggagagcagagtggggctggaaggtggaactcttagccaaagtcttggtttcttttggccagggtcctctttcaatggctggagaaggtggtgctggggggtgaacgctgacctcctcatgtgctgcccctccctcgcctgggcccggtaaagcccccacgtagccccagccagcctggaacatgcttcctgagctcccagctcttggtctttgcacccagtggaggaggaggtcagcccagggagctgagtctgcggtttagggcgtccaggggacgtggaagcatgtgggtcgtctggccacattaggtagggctgcagagacctgggctagagcagtcctgcggggtctggaaggggaagactggctgaggtgcggggcctggtctggaatgatcctgcgattttggagtgaagccatggagcgggaagagacaaccccccgcggggaatagcccggcaagtggccacgaggccaggctgaggtccagagaagcaggggcatgaatccataaatcccagggggcctggccatgggatgtgctggctgcacccggcccctgtgagagcccccgcaggctggcccccttctgcagtcagtggggctggggcagcttctctggcatggggcgaggcagccgcctgcacagtggcccccctgactgtgcgcccccaccctctccaggacgaccacggctacatttcccgtgagttccaccgccgctaccgcctgccgtccaacgtggaccagtcggccctctcttgctccctgtctgccgatggcatgctgaccttctgtggccccaagatccagactggcctggatgccacccacgccgagcgagccatccccgtgtcgcgggaggagaagcccacctcggctccctcgtcctaagcaggcattgcctcggctggctcccctgcagccctggcccatcatggggggagcaccctgagggcggggtgtctgtcttcctttgcttcccttttttcctttccaccttctcacatggaatgagggtttgagagagcagccaggagagcttagggtctcagggtgtcccagaccccgacaccggccagtggcggaagtgaccgcacctcacactcctttagatagcagcctggctcccctggggtgcaggcgcctcaactctgctgagggtccagaaggagggggtgacctccggccaggtgcctcctgacacacctgcagcctccctccgcggcgggccctgcccacacctcctggggcgcgtgaggcccgtggggccggggcttctgtgcacctgggctctcgcggcctcttctctcagaccgtcttcctccaacccctctatgtagtgccgctcttggggacatgggtcgcccatgagagcgcagcccgcggcaatcaataaacagcaggtgatacaagcaacccgccgtctgctggtgctgtctccatcaggggcgcgaggggcaggagggcggcgccgggagggaggacagcggggtctcctgctcgcgttggacccggtggcctcggaacgatggggtcgcctgcgtcccttccttctcctgagctcaagcgcctccctccacactgggctggaaggagaggttttgggggcagagcctctgatgggaaagggactggggagcggttccgagagctgggggcggggagggacctggaaggggctgcagggaatggagggaggccgggctcctttctctgtccgcgccggcaccggggcgggacgccagccctggcctccttctgcggggccgtccggttctctcggggtctgctgggtcgtcctgttctctcgggggtcctgctgccttcggggctgggctttaagggcactcgtgcttttgaggagctggaactcggcagcttcccctgggcaacccatcatggccccgagctggaggcggaagctcgctctgtcccctcccgggaccagacactgggcggccatgccagaccccgccacggggagggagactcggcctggggggccctggctgcctgctgcgctcaccgaggggcatccggggggccagagggcacccaaggggaagcagacgccacggcgggtgggccctgccagcgccctcagccaagtaaagcgccctcgaccccggaggccgaaggcaccgggaccctgaggcactgggacccccatggcaccagcaggacgaccacaggggcgcagcctccacccgggagaacacagacactgacaccaccgggttttcaaaaagtcagcaacaggcattagcgtgggcggccatagtgacgcccagtgacatcacgtgccacggacactgaacagcacacacaccacacacaccacacactccacacacaccgcacactccacacactccacacacaccacacacaccacacactccacacactccacacactccacactccacacactccacacacaccacacactccacacactccacacacaccacacactccacactccacacactccacacacaccacacactccacacacaccacacactccacacccaccacacactccacacactccacacacaccacacactccacacactccacacacaccacacacaccacacactccacacactccacacactccacacacaccacacactccacactccacacactccacacacaacacacactccacacacaccacacactccacacccaccacacacaccacacactccacacactccacacactccacacacaccacacactccacacacaacgcacactccacacactccacacacaccacacacaccacacactccacacacaccgcacactccacacactccacacacaccgcacactccacacacaccacacacaccacacacaccacacactccacactccacacacaccacacactccacacacacaccacacaccacacactccatacacaccacacactccacacactccacacactccacacacaccacacactccacacacaccacacactccacactccacacaccacacactccacacacacaccacacactccacacacacaccacacgcagcacagacaccacacactccacacacaccacacactccacacactccacacacaccgcacactccacacactccacacacaccgcacactccacacaccacacactccacacacacacaccacacactccacacacaacacactccacacacaccacagacacacacacacccctcaacacaccatgccctttgtctctctttgtattcctctggccaggccgtggtgtgacgggttctgagtcctgggagtggctcccctagactccccccctcctcctccctccagcaggacctgcccggctgttgtgccatcgagtccccatttgtacagaagggggtgccctgtggttggcaacaacatgacccactgtgctttggggctgcggctggatgtttttgaaaatcggggtgtctggggctccctgctcctcctgggtctgtcccggaccagctgagcggacacctttgctctgcacagcctggcagccattgcagggaggcgggcccaccgcaacatctggtagctccgggtcccgtcccaccggctgcacagtgaatggagctgtcactcacgcctgcagccttgcttgactgcgggtcctgcctggaccttgttaggggctggaaggtgactccctgaaaattatatggggtcctacccccaaaggctcagaatgggactgtgtttggcggtgggggctttgattaaattgaagtgatgtcactggggtgggccctggcccagtctggccggtgtccttgtaagaagaggagatgaggacacagacctacagagggacaaccccgtgagggcacagggaggagacactgtctgcaagccaaggagagacgccccagaggaaccggccctgctgccccttgaccttggactcccggcctccaggacccggcagaaacgatgtctgccattggagccgcagctgtggcgttgcagctgcgggaaccgacgcattcaggcccaaagacatagcctttggctaggccttggcagggtctgcaaggcccgtgggtggttcaccagatcctcgatcaggctccttggagagtcgcacggagcaccagggccagcccaggcagaacttcccctggctggtgggctgtctgatctcctctgctcccccagttgggtcttccagcagcacaggctcagcaaggacttggagggggtggggggaggggctctcatctcatctggcctccaagacatgcagcgtgacacctcccatctcccctcctggggcctcctgatgccatccttcctcggctctccaatcacaccccacccgggcggttcttaaactcaggggcctggggctgcttcacctctggcctggggtaggctagatacgcctgagagattgtccatacagggctcagagcctggctccatcccaggctggccacagcccctatctcctctcctcccaccttggggcctattctggaacagcctgccttgcaagggccgcccaggtgatttcagtgatttcactgtcaccatggctactgtgaggccaaggtcacacggactccccgcaggcaccaagctgacggtcatctgacagcagcctcatcaccaccttgtccagatgagacagaggctcagcagggacttgtgcaaggccccagccagccaatggcaaggcctggagacctaggctcccaccctgaagtcatctcaacgggcccagcctcaggagctgcctgtgctggggcctggggctgctttgcacccaagaccccttcagagtcacaggtgagtggccagattccacccccaccatgcccgccccgccagggcaggaggccacgtggatgtgagctttaatgcagggcgcagctctggccatggtgcccagccactttcctggagtctgagcagctgccaaggctctctggtggctgctcctacccacatggctcccatgggctgctgttggagagcttctgaagccgggaggatgcctgctccccttgcctcctttccaagctcgcctctgcccacccactgctaggcctgggactcacaccagccttctccgtgggtgctgctgccagctttctgccctctgggcctccctctccctcgcctggccttcagagggccgaggctctgatcacctctcccccgcttcccattgtgtggcctggcgtctgaggcccctgtggtctgactgccccactgctccctggtatgcattcaggttgaattcagagagctctgcgtgccagtgtccagccccattcaccagggcacacggccatcgtggaaagatgggattggccagtacttcccaagcctgccaggccgggagaaccacctgcagtgcattgcaaatacagactcctgggccccgctcacacccacttagagtctggaggggcagagtccagggagctgggcttttggtgcctccaggtgagccctatgatcaggtgcaagtgggagatgctgcgggacagcggcgcctcctcaggttggggcagcgggggagagaagtctcactggaagctgcctctccagtcttggggctcagcttctcgatctccagggaggctctccctcatcccactgctggggacgctggactctggagtgaaaatgacccacgctctcctctgctcccgttttcaccttgggcatcattgtcatcatcattatgagcagcagccggaaaagcattaatggagcacctgctgtatgccaggccttgcgcctgctgcgcttgtaacggcaattctcatgcagcctgcacagcagcctgtagcctgtttctattgttagctgaggacacccaggcttagaaatggagtcacctgcctggtgtccccagctggtgagggcttgggccaggtgcaccctgtctgtttgaccccaaagccagggctcagcaccgctgggcagatgattactgcaatgtcacacataatgtgaaaattgggaggcgctgaggaagcctgaggcactggtccctttcttctggtgacatgctgggtgactttggacagatctatcaacccctctgagtattcgatgtccgtctttgccagtcggctgaagctgggagaccgagtgcctgcggggagcctccagcccccagttcctttcaatcatcaccagcgtgcctcacacttaccaccaggtggcagcagaggacttgcctggccgccgagaccttggccgcaggagacttgccgaacctcagccttaaaggtcaccttcactcttcaagacagtgggaagcggccgcagcaaacatccgcagagggcctggctccgggagcctctggactgcgtgctgccaagctgtgggagacccaccctgacccccggggagctagtgtccagcaggggagactgagatgggaagacacaaaagccgtgctggaagccagcggtgtttctttaccatgagcagttttggggtttcatttgcttgtgtgtaaaatcacttgaaaaaggaggcgtcactgtctggaaggccagggctgtgctggggtccctgggggctctggcggggtttcctccgcgcagaatgacgtcactccccggcttccggcccaggtcagctcttcctaggaagcctcttgtgaagagcagcccccgtcccgcccacatccgcagaggcctgtgagtggggcagggcggtaagtgtccctggcaggcagcctcagctgacgcggtgttggggtcacagggtcagaggtcctgccagccaaggctgcatgtggctgtctgagaaggggctgagacagagatgcaggcacaggtgccagacagtgccagcttggaaggaggaggcatcaggagagccgaggggttgagggacaaggagctgcttgctgggggcagggcggccttctctctacagggcaggcacctgcctcccgctctgcccttggcctccaggatgggagctgggaaaggagtctcccttcaggggagggacccttggcaggggctagtgaaggctccgtcagcgttagctcccaggctgctggggaggccagaaggccctgctctgtgggatttcctctgagaccctgggctaaggactgagtttgcaggggcaggaaatgtgggcgggctccaaacctgctgtgcaggctgctgccattagaacagaacagaaggaaagatacacatgcatccatgcacacacacacacagtgtgcccatatgcacagaacacacatgcacatagaagcacaatgtttgcacagtgtgcacccatgcacaacacaccatgcacactcgtgcacaacacacaaaacacatgctcacacacctcacacatgtgcgcacaaatgcacaacacaaacacacatgcaacatacaaacacatgtacacacatcacacaatacatgtggacacacacggacacacagaagcacataacacctacgcgtgcacaaatgcccacatgcacacctacacaaacatacactcacacagcccacaggaagacgcacacaccactatcatggccatggccaagctctgggctgttacttcattgcgcggctgccctctgtgtctgatttgtacttgaccgtgagagacccctttccaccctccagcttaggggagccccctcctgtgtgctgctcagcagcctctttgacatctagctgcctgggccctggcattcctcgtgccacctgcagagacgtcagagacggcacgagggaggagcgggtatgagggaggggccgtgtggcagctcaaggacgccccaggggcaccgggaaggaggggcagtgaagagagggggtggctcattattctgcagagctgtctgccccgggagcctgtgagcgctgtgcctttaccttggccaggagtgagagaaatcaatttccaaagcatcctggctggaaaatcttgctttccagagcagtgtgggtctccgagcagggctcccgaaggccctgacgcagaattgcagatggctggctgttgaggggacagggcgccccctggggaagacacgtcagacctagaggactggggtgggaaggcaggacacgccaaatcccatctgccgttcgcaggaacactgagaccccacgatgaccctggcagtggctctctgatggtgataaaaggcagcggctgcccttggaggagctggtggctgacttatttctgacagccggtaatggccaagtgctgggcctttgattgtacggggctgggctgcactccacacaggagctggctcaggggtcctgctggcagctgcagtgctcttacctgctcggtgatgagaaacccaattaagtaagtggcctgcagccatgtggcctgtgccaggagccaagcggggagccccggctctccccctgagcccccttgctcactcttcctgcctgcccctgcctgtggctgtcggaaagggtgtttctgcaatgaaccagctggaatccagcagtgctgtggggaatttcccacggctgctgtgacaaacgaccacaagctggttggcttaaaacaacagaaattcactctgaggcacgaagtccgaaatcaaggtatctgcagggccgtgttccctctggaggctctggggtgaatcttccttacctcctccagcattcccggttgctggaagcctctgagctccagtctctgcctccgccttcccctcccgtctgtgtcctttccccttaaaggacatcagccattgggtttagggtctgctctcatccaggacgatctcaccttgatgcttcactgaattacatctgcaaagattctgtttccaaataaggtcacatgcccaggttctggggtttggaacttagacacatgttttgggggacactgttccacccatgacaagtatggatgacgtccctgagatcctgtgtccttgcatttggggacgcttcacatacgccattgtacacgttcctctcaggaacctctgaggttggcgggactgtttttgatattcattgcgcatgtgtgtccccgtgggtgtgtatgtgtgagaatgtgtgagtgtgggtgtccctgtgagtgggggtgagtgtgagtgtgtgcgtatgaggttccacatacatatgtgagtgtgtccctgtgagtgagtcccctgtgaatgggtgtaagtgagcatgtgtgtgtgagtccctgtgcatgggtatgagcatgtgtgtgtccctgtgtgaatgaatgtgtgtgagtccctgtgtgtaacagcatgtgtgtgtgtgtccctgtgtgtgagtgaatgtgtatgtgtgcatgtgtgagtgtgttacgagtatgggtgtccctgtgaacgtgtgtgagtgggtatgagtgtgaatgtccctgagtggttgtgtgtgtgtgtgtctgtccctgtgtatgtgtgtaagtgtgtctgtccctgtatgtgagtgtgggtatccttgtgagagtgtgtgattggtgtgagtgtgggtgtcctcattagtggtttgtgtgtgtgtccatccctgtgtatgtgtgtgtaagtgcggctgtccctgtgtgtgtgtgtgtgggtgtcctcatgagtggttgtgtgtgtgtgtgtggggggggtctctgggtttgtgtatgggtgtgtgtgagtgggtgtgtgtgtgtccttgtgagtggttgtgagtgcgggtgtccctgtgagtggttttgtgtgtgggtgtgtgtatgactctgtgagggggttatgtgtgtgtgtgggagtgtggctgtccctgtgagtgtgtgagtgtgggtgtccctgtgagtgattgtgtgtagatgtgtgtgtatgagtgtggtgtccctgtgagtgattgtgtgtaggtgtgtgtgtgagtgtgggtgtccctgtgagtgattatgtgtaggtgtgtgtgtgtatgagtgtgggtgtccctgtgtgtgtaggtgtatgtgtgtatgagtgtggtgtccctgtgagtggctgtgtgtgtgagtgtgtttgtatgagtgtgggtgtccctgtgagtggctgtgtgtgtgagtgtgtgtgtatgagtgtgggtgtccctgtgagtgattgtgtgtaggtgtgtgtgtgtatgagtgtggtgtccctgtgagtggctgtgtgtagatgtgtgtgtgtgtgtccctgtgagtgggctgagcccaggtacttggtttctgcagggaacttacccacgtttgtgggcccctggtggcaaatgtccagtgtcagccagggcaggccgtggttggaactggataggagactttgtattttggggctgcccatggcgggtccccgtcctcatcagaggcatcccaggggtgacctttcatctgctggagctgctgccactccatgctgtgactcctgatatgcatccactcccgtgttagcccaggtctggacgtgcacagtggccagggtgaggggttctgtccagaataccctcggggaagggggtctcagggaccatcttctttggcaggtgggcagagcagtgggaagcctgggttctgggtgggggcacggcaggcaggctcttctggcagctgggtgatgcccgtgagcgctaaatgcaagacgtgtgaacacaggcggctcacagatgccagtgctgagtgcgactgtgcctccgcctggcctcgaggcatttgctgaacttccagcttacccggttctcctcctgtgctgactccagggcctccttgggccctgctaggcgcgggctgccgccgaggggatgtgggtgggctggcagctgctatcaaggctctgctgctggtcacagctgggcagtggccccagggcccccagacggctcagcacatgtgtaccctggccttgtggccactcaggtgtcccaggcctgagctcatgaagggcagagggcattccctggcacccttgcagttcttcaggggtcctgagtgcgtagtgcccattaagtggcaatgttgatggggacaaccaacacagtccacgagcttgcccctctgtgtgtggaatgggcttgcagcatggtttgtgccagccccgacaggcaggggccctttaaatgagttcccgcgcagcccaccggggcctggctgattgctcaagctgcctgctggagctgcacctgctctaaattgtgatcaggctaaattagatggaaaaatatgcaaatgtagttggagctttttggcaaattagcacgcaagcgggtggagatgaggctcgccggcgagggggagcacccatatcgtttgactaattattgaggcagtcaaattaagacagtgggctcgccaccagggtgggttttaaagggggaattatttcagctacgttttctagttttctgaggctgcctgaaaaagagaagaaaagatacttccctgccagtttctctgctgaataggtgaaagtcagacagctttttcgtgctgagtccacagacgctcctcggtcatctttgatgaacatagactggaatatagaaaccaaaaatattttgagctgggagggagggttgatttgtctaaacctgctggaggtgagtggtcaggccctgaaccgggtcatgcatgctgaagaagcaatcgttggcctccatttgtgtatggcgcgtgcgtggtgatgtcttaaccacaccaattccacctggacgggctgcagttgttaccaattgtgagtgaccataccatagggatgaaccagcagagaagacccagtggtcacatgaggccaggctgagtgcaatgaccaagacaaaggcatgtctaggttacccagtgggagcagtggaagcggcgcttgtcatttggagcgggtcaggagccatcccatgccaccgcggcctctgtagtctcacgacttcctctgcacgcccggggcacttcattcacggcatggatgtggccctcgtgttgctgattctcatagtttttggtgcatccttcttcactccatcagccgcgaggattttgtcttctgccgtcttgtgttttgacttccccttctgccctttctctcaaggtcgccgtttgcacacagcagcatctggagggatgagctcgcctgattccatgcaggtgggttcctgggtggggcattggaggctatctctgaacgactgggtggcaggaaggtacccctggtgcatggaggcctggctgaagcatggccggtctccctgggacaacgtcattatctgtttgccctttgatttcagaatcgaactcagctccgtggttcacacttgtttccagagatgccaacaagctgctcttccccgagtccccgcaggtgtgcacctttgggaaggtatcagatagtgacctcctgggctgggctgtgcctgtgtgcacctgtcacgagcagggctgtgggggtggagatgttaaccatctcaccagaggagggctggactggatccaagaaacttttttccccctgggatggaatttgaaagtggaaaaaaagtcacataaaaatcagtgtagctaattaacaagaatacatggaacagtctccgtcgttttccaagtctgctatgctgcggcacataagtagaggttgaaacaacaatggcaacagcggtgagaaaggatacggggcctgctgagatctgcatcctgtccttaagggcctgatggttttgaattgtcctccaaggccactgccgtggttggagaggccgacgtgtcatcagcacagctaaaacagacaactcgggaaatatgggaacctgggggagactggagcccaagtcgctgcaaatccttgatgaggagacacaagaaaccactacttcaaagctggaggcagcttctgcacagaacagattcatgtttgcatttggggatgactgtctgctcactctgggacgtccatggttctgcacatgtgtagccgggggacatgtttctgttcttggaagacctggaagatttatattgttttatttttttttaattctttttgaggcagagtctcactctgtcgcccaggctggagtacagtggtgcaatctcagctcactgcaaccttcacctcccaggttcaagcgattctcttgtctcagactcttgagtagctgggactacaggtgcacgccaccatgcctggctgatgttttgtgtttttattagagacagggattcaccatattggtcaggccggtttcgaactcttgacctcaggtgatccacctgcctcggcctcccaaattgctgggattacaggtgtgagccactgcccctggctggaagcctttagtggtgtaaactgtgggtgggttttagcagatccgtgtctccgtgggttatgttttctccgtgtctccgtgggttatgttttctttacatcagatatttctttcctcactacctggaagaggtacccgttctttccaagcatgggttaatgagaaggaagcaacaaaaggctgggagagaacacatggagggaagctgccgttggtctcgaagctgtgccatggcgggtaccgtctcccctctgatgaatttataaccccctatgtgctaccatttcaggttaaaccaacttgaccaaggacttccagtttcttggaaaatgatagttttgctaaccttcctgctgattataaactctggacaaaatagaaacaaccattatttgaaggcattggaaagtgacataaagcatgaaaaaaaaaaaaaactcaagctaaagaggtatgacccttgcaaaaaagggagccatgcttatctgggttttgttctcagatccttcttcagaccgccccatatggaatggagctgaagtggaacagtagttttgttgggctgagaggtcagaggccagagttcaaggctgccaaaaaacaacaacaaaaaaagggagccacagagaggggagctcctaaatctagcacaaatttccctgaaacccttggctgataactaaagtttgcatgtgcaagccaagactccagaaagcccagaaagcaggaacagctggaggctgagagctgggcagacatttcagcatctggctagtcccggaaagaccaagtttggagttcatgtgataagcaccttgagcttttcatcagaaaccctgggatagagtaagtttttctatgtgctgaagtaaagtcattgttaattatatagtcagaagacagaaggatactatattcaaactgctgagagaacaatcagtcccctacatacccagctaaactatcactcgagaatgatagcaaaataaagatgtttcagatacacaaaaaccagaagttcaccaacagcatacaaaagatacataccaaaggacttctatttgatggcttttaaagtgatctaaaacattggtcaggtgggatttaaagatgaccaggattttgtgctattctgtagagatatttagactttaagttagcaatgcctgctaaaatttaaaaagatacttttcaaaatagatggaataaaggaattttacaaaacttttaatcaatgcaaagcaagataggagaggagaataaagggatagaatgaggacagaccttggggaatgtgtgaatgctgaatgctggcctttcttgttctgtgttctttttgtttgtttgtttgtgtttttgagacagagtcttgctctatcgcccaagctggagtgcagtggtgtgatctcagctcttctgcctctcaggttcaagcaactctcctgcctcagcctcctgagtagctgggattgcaggcatgtgccaccatgcctggagaattctgtgttcttaatgggggtcaaagggaaagctcacctggctgtggatgggaatgttttgcaaatgtccttgaatatctgcccaaccaatcgtgctccaaagaggtatatttgggcagggaatgaagacctagaggcagatgttggctgtctcttgagtagttgaagcctggacttggagtgggagagccatgctcagggctctctcactgctgtgggtgaggtcactcctggggcaggaggaggctgagcccccatggaaagcaggggttgctcacatcaagttcccttcaagggccccaaactttcagggaggcctggtgcctgttacatccctgggagggatctgagggagggctccatgccctgggatgggacagagaggcaaggcaaggagaaggaggctgacctcgagaggctgagatgcaacctgcaaaagaggacagcagtgcccaagtcaggtgggtggaggggccaccaccccaggggcacgctgtgggctgagccagcctttcctaagggccagggagggcatctgtaaatgcacagacccagatgtgtgagatctgaacaccaaaggcaagatggtctcgcatgcgagggttgtctggaacatctgggaactgggatgtggccgaaaccatcgtttggtccatgctgttccgacgtgagcttcgtgatcatgtccccggcctcctgtctccagctgtggggtagctgcgctgctttgggattgagtctgttctgactgtgggttcagggatgggtgctccctgcagtccgcacctggtgtttccctagatggaggccgactcaggttgggcgatctgtcccgaccgccgagctgcaggaacagtgagtgcagctctgggaagaggcttcccctcccacagagagcgtgggcaaggtgacctttctccctcctggtctgacatggtcatgcacagacctgggctgtggcagcctccaggcaaagcccatgcagggaagatggcagagctggggaaacccctgagaaagggaaccacgtccaaccatctctggatttttctggttttgcaaaagccagttggggttggtctttctgtaacccacagctgaatgtgtctcacttggtcctggtgggactcccgtccaccagagtgacataaccggttgcaggtcacccaacagcaggtgcttgtgatggcttaccctcaggttggctgagggcctggccctgtatagtccagggattctgatagaatgattgcattggatcagccacgtggcggcaggtgattccctgctcagcatccgaaccctctgctacccccgcagggtcctgcggccccactcacaggtgccctgtgaggaggaggtggagcgagaggagaggggactgggcccgacactcactgatcttgaatgcggcccatgggccaggtgtggaggagcaggaggcaggtgtcattgtcacccttccacactcagcagatggactccagaggctgaggcccctgggccagtggcagggtggaattcagcagaggcttctgtttccaaagcaggagccaaccgttctttcaagactgggtctgccccaggcctccataccctgctggtcattacgcagccactctagcaattagacacctgggaatcaggtacccaggactgttttctgtaaagccctattaaaatattcatgagctccatgaattctccccgtgctgggggctcttttcttgtggcctcgggtgcagctggtgctggctctgtgcaggtctctggttttattgactgggttggtccttggcctcatccttccgtggctccattttcctgcccgcccatcccctggccaccgctctgagggctgccgtgggtcctgctgttatgggtcttgtgccacgtgcaccatagctagctgagcagttgaagccccatggatggtgttgggcccagggcttggctccacaggacactcaggccagccctggggtctgctggggctgctgcccaggattcctggcagtgccgatgcggtcagtgcctgggaacctttactgcaagacagtgtgcagatacagtgcaggtctcctagggagtccagacaggcctgaggcggcagctggaggctcctcagcagggactgggccctgagtcacaggctcatgtgctcggctcggagcaggagtcaagaggtttccgcctctgcttagcccctgactcactgaggcctccctggacctcggtttcttcttctgtgacataatggactggggtgggtttggaggatcaaggacacctctgaaaatatgatcnnnnnnnnnnnnnnnnnnnnnnnnnnnnnnnnnnnnnnnnnnnnnnnnnnnnnnnnnnnnnnnnnnnnnnnnnnnnnnnnnnnnnnnnnnnnnnnnnnnnnnnnnnnnnnnnnnnnnnnnnnnnnnnnnnnnnnnnnnnnnnnnnnnnnnnnnnnnnnnnnnnnnnnnnnnnnnnnnnnnnnnnnnnnnnnnnnnnnnnnnnnnnnnnnnnnnnnnnnnnnnnnnnnnnnnnnnnnnnnnnnnnnnnnnnnnnnnnnnnnnnnnnnnnnnnnnnnnnnnnnnnnnnnnnnnnnnnnnnnnnnnnnnnnnnnnnnnnnnnnnnnnnnnnnnnnnnnnnnnnnnnnnnnnnnnnnnnnnnnnnnnnnnnnnnnnnnnnnnnnnnnnnnnnnnnnnnnnnnnnnnnnnnnnnnnnnnnnnnnnnnnnnnnnnnnnnnnnnnnnnnnnnnnnnnnnnnnnnnnnnnnnnnnnnnnnnnnnnnnnnnnnnnnnnnnnnnnnnnnnnnnnnnnnnnnnnnnnnnnnnnnnnnnnnnnnnnnnnnnnnnnnnnnnnnnnnnnnnnnnnnnnnnnnnnnnnnnnnnnnnnnnnnnnnnnnnnnnnnnnnnnnnnnnnnnnnnnnnnnnnnnnnnnnnnnnnnnnnnnnnnnnnnnnnnnnnnnnnnnnnnnnnnnnnnnnnnnnnnnnnnnnnnnnnnnnnnnnnnnnnnnnnnnnnnnnnnnnnnnnnnnnnnnnnnnnnnnnnnnnnnnnnnnnnnnnnnnnnnnnnnnnnnnnnnnnnnnnnnnnnnnnnnnnnnnnnnnnnnnnnnnnnnnnnnnnnnnnnnnnnnnnnnnnnnnnnnnnnnnnnnnnnnnnnnnnnnnnnnnnnnnnnnnnnnnnnnnnnnnnnnnnnnnnnnnnnnnnnnnnnnnnnnnnnnnnnnnnnnnnnnnnnnnnnnnnnnnnnnnnnnnnnnnnnnnnnnnnnnnnnnnnnnnnnnnnnnnnnnnnnnnnnnnnnnnnnnnnnnnnnnnnnnnnnnnnnnnnnnnnnnnnnnnnnnnnnnnnnnnnnnnnnnnnnnnnnnnnnnnnnnnnnnnnnnnnnnnnnnnnnnnnnnnnnnnnnnnnnnnnnnnnnnnnnnnnnnnnnnnnnnnnnnnnnnnnnnnnnnnnnnnnnnnnnnnnnnnnnnnnnnnnnnnnnnnnnnnnnnnnnnnnnnnnnnnnnnnnnnnnnnnnnnnnnnnnnnnnnnnnnnnnnnnnnnnnnnnnnnnnnnnnnnnnnnnnnnnnnnnnnnnnnnnnnnnnnnnnnnnnnnnnnnnnnnnnnnnnnnnnnnnnnnnnnnnnnnnnnnnnnnnnnnnnnnnnnnnnnnnnnnnnnnnnnnnnnnnnnnnnnnnnnnnnnnnnnnnnnnnnnnnnnnnnnnnnnnnnnnnnnnnnnnnnnnnnnnnnnnnnnnnnnnnnnnnnnnnnnnnnnnnnnnnnnnnnnnnnnnnnnnnnnnnnnnnnnnnnnnnnnnnnnnnnnnnnnnnnnnnnnnnnnnnnnnnnnnnnnnnnnnnnnnnnnnnnnnnnnnnnnnnnnnnnnnnnnnnnnnnnnnnnnnnnnnnnnnnnnnnnnnnnnnnnnnnnnnnnnnnnnnnnnnnnnnnnnnnnnnnnnnnnnnnnnnnnnnnnnnnnnnnnnnnnnnnnnnnnnnnnnnnnnnnnnnnnnnnnnnnnnnnnnnnnnnnnnnnnnnnnnnnnnnnnnnnnnnnnnnnnnnnnnnnnnnnnnnnnnnnnnnnnnnnnnnnnnnnnnnnnnnnnnnnnnnnnnnnnnnnnnnnnnnnnnnnnnnnnnnnnnnnnnnnnnnnnnnnnnnnnnnnnnnnnnnnnnnnnnnnnnnnnnnnnnnnnnnnnnnnnnnnnnnnnnnnnnnnnnnnnnnnnnnnnnnnnnnnnnnnnnnnnnnnnnnnnnnnnnnnnnnnnnnnnnnnnnnnnnnnnnnnnnnnnnnnnnnnnnnnnnnnnnnnnnnnnnnnnnnnnnnnnnnnnnnnnnnnnnnnnnnnnnnnnnnnnnnnnnnnnnnnnnnnnnnnnnnnnnnnnnnnnnnnnnnnnnnnnnnnnnnnnnnnnnnnnnnnnnnnnnnnnnnnnnnnnnnnnnnnnnnnnnnnnnnnnnnnnnnnnnnnnnnnnnnnnnnnnnnnnnnnnnnnnnnnnnnnnnnnnnnnnnnnnnnnnnnnnnnnnnnnnnnnnnnnnnnnnnnnnnnnnnnnnnnnnnnnnnnnnnnnnnnnnnnnnnnnnnnnnnnnnnnnnnnnnnnnnnnnnnnnnnnnnnnnnnnnnnnnnnnnnnnnnnnnnnnnnnnnnnnnnnnnnnnnnnnnnnnnnnnnnnnnnnnnnnnnnnnnnnnnnnnnnnnnnnnnnnnnnnnnnnnnnnnnnnnnnnnnnnnnnnnnnnnnnnnnnnnnnnnnnnnnnnnnnnnnnnnnnnnnnnnnnnnnnnnnnnnnnnnnnnnnnnnnnnnnnnnnnnnnnnnnnnnnnnnnnnnnnnnnnnnnnnnnnnnnnnnnnnnnnnnnnnnnnnnnnnnnnnnnnnnnnnnnnnnnnnnnnnnnnnnnnnnnnnnnnnnnnnnnnnnnnnnnnnnnnnnnnnnnnnnnnnnnnnnnnnnnnnnnnnnnnnnnnnnnnnnnnnnnnnnnnnnnnnnnnnnnnnnnnnnnnnnnnnnnnnnnnnnnnnnnnnnnnnnnnnnnnnnnnnnnnnnnnnnnnnnnnnnnnnnnnnnnnnnnnnnnnnnnnnnnnnnnnnnnnnnnnnnnnnnnnnnnnnnnnnnnnnnnnnnnnnnnnnnnnnnnnnnnnnnnnnnnnnnnnnnnnnnnnnnnnnnnnnnnnnnnnnnnnnnnnnnnnnnnnnnnnnnnnnnnnnnnnnnnnnnnnnnnnnnnnnnnnnnnnnnnnnnnnnnnnnnnnnnnnnnnnnnnnnnnnnnnnnnnnnnnnnnnnnnnnnnnnnnnnnnnnnnnnnnnnnnnnnnnnnnnnnnnnnnnnnnnnnnnnnnnnnnnnnnnnnnnnnnnnnnnnnnnnnnnnnnnnnnnnnnnnnnnnnnnnnnnnnnnnnnnnnnnnnnnnnnnnnnnnnnnnnnnnnnnnnnnnnnnnnnnnnnnnnnnnnnnnnnnnnnnnnnnnnnnnnnnnnnnnnnnnnnnnnnnnnnnnnnnnnnnnnnnnnnnnnnnnnnnnnnnnnnnnnnnnnnnnnnnnnnnnnnnnnnnnnnnnnnnnnnnnnnnnnnnnnnnnnnnnnnnnnnnnnnnnnnnnnnnnnnnnnnnnnnnnnnnnnnnnnnnnnnnnnnnnnnnnnnnnnnnnnnnnnnnnnnnnnnnnnnnnnnnnnnnnnnnnnnnnnnnnnnnnnnnnnnnnnnnnnnnnnnnnnnnnnnnnnnnnnnnnnnnnnnnnnnnnnnnnnnnnnnnnnnnnnnnnnnnnnnnnnnnnnnnnnnnnnnnnnnnnnnnnnnnnnnnnnnnnnnnnnnnnnnnnnnnnnnnnnnnnnnnnnnnnnnnnnnnnnnnnnnnnnnnnnnnnnnnnnnnnnnnnnnnnnnnnnnnnnnnnnnnnnnnnnnnnnnnnnnnnnnnnnnnnnnnnnnnnnnnnnnnnnnnnnnnnnnnnnnnnnnnnnnnnnnnnnnnnnnnnnnnnnnnnnnnnnnnnnnnnnnnnnnnnnnnnnnnnnnnnnnnnnnnnnnnnnnnnnnnnnnnnnnnnnnnnnnnnnnnnnnnnnnnnnnnnnnnnnnnnnnnnnnnnnnnnnnnnnnnnnnnnnnnnnnnnnnnnnnnnnnnnnnnnnnnnnnnnnnnnnnnnnnnnnnnnnnnnnnnnnnnnnnnnnnnnnnnnnnnnnnnnnnnnnnnnnnnnnnnnnnnnnnnnnnnnnnnnnnnnnnnnnnnnnnnnnnnnnnnnnnnnnnnnnnnnnnnnnnnnnnnnnnnnnnnnnnnnnnnnnnnnnnnnnnnnnnnnnnnnnnnnnnnnnnnnnnnnnnnnnnnnnnnnnnnnnnnnnnnnnnnnnnnnnnnnnnnnnnnnnnnnnnnnnnnnnnnnnnnnnnnnnnnnnnnnnnnnnnnnnnnnnnnnnnnnnnnnnnnnnnnnnnnnnnnnnnnnnnnnnnnnnnnnnnnnnnnnnnnnnnnnnnnnnnnnnnnnnnnnnnnnnnnnnnnnnnnnnnnnnnnnnnnnnnnnnnnnnnnnnnnnnnnnnnnnnnnnnnnnnnnnnnnnnnnnnnnnnnnnnnnnnnnnnnnnnnnnnnnnnnnnnnnnnnnnnnnnnnnnnnnnnnnnnnnnnnnnnnnnnnnnnnnnnnnnnnnnnnnnnnnnnnnnnnnnnnnnnnnnnnnnnnnnnnnnnnnnnnnnnnnnnnnnnnnnnnnnnnnnnnnnnnnnnnnnnnnnnnnnnnnnnnnnnnnnnnnnnnnnnnnnnnnnnnnnnnnnnnnnnnnnnnnnnnnnnnnnnnnnnnnnnnnnnnnnnnnnnnnnnnnnnnnnnnnnnnnnnnnnnnnnnnnnnnnnnnnnnnnnnnnnnnnnnnnnnnnnnnnnnnnnnnnnnnnnnnnnnnnnnnnnnnnnnnnnnnnnnnnnnnnnnnnnnnnnnnnnnnnnnnnnnnnnnnnnnnnnnnnnnnnnnnnnnnnnnnnnnnnnnnnnnnnnnnnnnnnnnnnnnnnnnnnnnnnnnnnnnnnnnnnnnnnnnnnnnnnnnnnnnnnnnnnnnnnnnnnnnnnnnnnnnnnnnnnnnnnnnnnnnnnnnnnnnnnnnnnnnnnnnnnnnnnnnnnnnnnnnnnnnnnnnnnnnnnnnnnnnnnnnnnnnnnnnnnnnnnnnnnnnnnnnnnnnnnnnnnnnnnnnnnnnnnnnnnnnnnnnnnnnnnnnnnnnnnnnnnnnnnnnnnnnnnnnnnnnnnnnnnnnnnnnnnnnnnnnnnnnnnnnnnnnnnnnnnnnnnnnnnnnnnnnnnnnnnnnnnnnnnnnnnnnnnnnnnnnnnnnnnnnnnnnnnnnnnnnnnnnnnnnnnnnnnnnnnnnnnnnnnnnnnnnnnnnnnnnnnnnnnnnnnnnnnnnnnnnnnnnnnnnnnnnnnnnnnnnnnnnnnnnnnnnnnnnnnnnnnnnnnnnnnnnnnnnnnnnnnnnnnnnnnnnnnnnnnnnnnnnnnnnnnnnnnnnnnnnnnnnnnnnnnnnnnnnnnnnnnnnnnnnnnnnnnnnnnnnnnnnnnnnnnnnnnnnnnnnnnnnnnnnnnnnnnnnnnnnnnnnnnnnnnnnnnnnnnnnnnnnnnnnnnnnnnnnnnnnnnnnnnnnnnnnnnnnnnnnnnnnnnnnnnnnnnnnnnnnnnnnnnnnnnnnnnnnnnnnnnnnnnnnnnnnnnnnnnnnnnnnnnnnnnnnnnnnnnnnnnnnnnnnnnnnnnnnnnnnnnnnnnnnnnnnnnnnnnnnnnnnnnnnnnnnnnnnnnnnnnnnnnnnnnnnnnnnnnnnnnnnnnnnnnnnnnnnnnnnnnnnnnnnnnnnnnnnnnnnnnnnnnnnnnnnnnnnnnnnnnnnnnnnnnnnnnnnnnnnnnnnnnnnnnnnnnnnnnnnnnnnnnnnnnnnnnnnnnnnnnnnnnnnnnnnnnnnnnnnnnnnnnnnnnnnnnnnnnnnnnnnnnnnnnnnnnnnnnnnnnnnnnnnnnnnnnnnnnnnnnnnnnnnnnnnnnnnnnnnnnnnnnnnnnnnnnnnnnnnnnnnnnnnnnnnnnnnnnnnnnnnnnnnnnnnnnnnnnnnnnnnnnnnnnnnnnnnnnnnnnnnnnnnnnnnnnnnnnnnnnnnnnnnnnnnnnnnnnnnnnnnnnnnnnnnnnnnnnnnnnnnnnnnnnnnnnnnnnnnnnnnnnnnnnnnnnnnnnnnnnnnnnnnnnnnnnnnnnnnnnnnnnnnnnnnnnnnnnnnnnnnnnnnnnnnnnnnnnnnnnnnnnnnnnnnnnnnnnnnnnnnnnnnnnnnnnnnnnnnnnnnnnnnnnnnnnnnnnnnnnnnnnnnnnnnnnnnnnnnnnnnnnnnnnnnnnnnnnnnnnnnnnnnnnnnnnnnnnnnnnnnnnnnnnnnnnnnnnnnnnnnnnnnnnnnnnnnnnnnnnnnnnnnnnnnnnnnnnnnnnnnnnnnnnnnnnnnnnnnnnnnnnnnnnnnnnnnnnnnnnnnnnnnnnnnnnnnnnnnnnnnnnnnnnnnnnnnnnnnnnnnnnnnnnnnnnnnnnnnnnnnnnnnnnnnnnnnnnnnnnnnnnnnnnnnnnnnnnnnnnnnnnnnnnnnnnnnnnnnnnnnnnnnnnnnnnnnnnnnnnnnnnnnnnnnnnnnnnnnnnnnnnnnnnnnnnnnnnnnnnnnnnnnnnnnnnnnnnnnnnnnnnnnnnnnnnnnnnnnnnnnnnnnnnnnnnnnnnnnnnnnnnnnnnnnnnnnnnnnnnnnnnnnnnnnnnnnnnnnnnnnnnnnnnnnnnnnnnnnnnnnnnnnnnnnnnnnnnnnnnnnnnnnnnnnnnnnnnnnnnnnnnnnnnnnnnnnnnnnnnnnnnnnnnnnnnnnnnnnnnnnnnnnnnnnnnnnnnnnnnnnnnnnnnnnnnnnnnnnnnnnnnnnnnnnnnnnnnnnnnnnnnnnnnnnnnnnnnnnnnnnnnnnnnnnnnnnnnnnnnnnnnnnnnnnnnnnnnnnnnnnnnnnnnnnnnnnnnnnnnnnnnnnnnnnnnnnnnnnnnnnnnnnnnnnnnnnnnnnnnnnnnnnnnnnnnnnnnnnnnnnnnnnnnnnnnnnnnnnnnnnnnnnnnnnnnnnnnnnnnnnnnnnnnnnnnnnnnnnnnnnnnnnnnnnnnnnnnnnnnnnnnnnnnnnnnnnnnnnnnnnnnnnnnnnnnnnnnnnnnnnnnnnnnnnnnnnnnnnnnnnnnnnnnnnnnnnnnnnnnnnnnnnnnnnnnnnnnnnnnnnnnnnnnnnnnnnnnnnnnnnnnnnnnnnnnnnnnnnnnnnnnnnnnnnnnnnnnnnnnnnnnnnnnnnnnnnnnnnnnnnnnnnnnnnnnnnnnnnnnnnnnnnnnnnnnnnnnnnnnnnnnnnnnnnnnnnnnnnnnnnnnnnnnnnnnnnnnnnnnnnnnnnnnnnnnnnnnnnnnnnnnnnnnnnnnnnnnnnnnnnnnnnnnnnnnnnnnnnnnnnnnnnnnnnnnnnnnnnnnnnnnnnnnnnnnnnnnnnnnnnnnnnnnnnnnnnnnnnnnnnnnnnnnnnnnnnnnnnnnnnnnnnnnnnnnnnnnnnnnnnnnnnnnnnnnnnnnnnnnnnnnnnnnnnnnnnnnnnnnnnnnnnnnnnnnnnnnnnnnnnnnnnnnnnnnnnnnnnnnnnnnnnnnnnnnnnnnnnnnnnnnnnnnnnnnnnnnnnnnnnnnnnnnnnnnnnnnnnnnnnnnnnnnnnnnnnnnnnnnnnnnnnnnnnnnnnnnnnnnnnnnnnnnnnnnnnnnnnnnnnnnnnnnnnnnnnnnnnnnnnnnnnnnnnnnnnnnnnnnnnnnnnnnnnnnnnnnnnnnnnnnnnnnnnnnnnnnnnnnnnnnnnnnnnnnnnnnnnnnnnnnnnnnnnnnnnnnnnnnnnnnnnnnnnnnnnnnnnnnnnnnnnnnnnnnnnnnnnnnnnnnnnnnnnnnnnnnnnnnnnnnnnnnnnnnnnnnnnnnnnnnnnnnnnnnnnnnnnnnnnnnnnnnnnnnnnnnnnnnnnnnnnnnnnnnnnnnnnnnnnnnnnnnnnnnnnnnnnnnnnnnnnnnnnnnnnnnnnnnnnnnnnnnnnnnnnnnnnnnnnnnnnnnnnnnnnnnnnnnnnnnnnnnnnnnnnnnnnnnnnnnnnnnnnnnnnnnnnnnnnnnnnnnnnnnnnnnnnnnnnnnnnnnnnnnnnnnnnnnnnnnnnnnnnnnnnnnnnnnnnnnnnnnnnnnnnnnnnnnnnnnnnnnnnnnnnnnnnnnnnnnnnnnnnnnnnnnnnnnnnnnnnnnnnnnnnnnnnnnnnnnnnnnnnnnnnnnnnnnnnnnnnnnnnnnnnnnnnnnnnnnnnnnnnnnnnnnnnnnnnnnnnnnnnnnnnnnnnnnnnnnnnnnnnnnnnnnnnnnnnnnnnnnnnnnnnnnnnnnnnnnnnnnnnnnnnnnnnnnnnnnnnnnnnnnnnnnnnnnnnnnnnnnnnnnnnnnnnnnnnnnnnnnnnnnnnnnnnnnnnnnnnnnnnnnnnnnnnnnnnnnnnnnnnnnnnnnnnnnnnnnnnnnnnnnnnnnnnnnnnnnnnnnnnnnnnnnnnnnnnnnnnnnnnnnnnnnnnnnnnnnnnnnnnnnnnnnnnnnnnnnnnnnnnnnnnnnnnnnnnnnnnnnnnnnnnnnnnnnnnnnnnnnnnnnnnnnnnnnnnnnnnnnnnnnnnnnnnnnnnnnnnnnnnnnnnnnnnnnnnnnnnnnnnnnnnnnnnnnnnnnnnnnnnnnnnnnnnnnnnnnnnnnnnnnnnnnnnnnnnnnnnnnnnnnnnnnnnnnnnnnnnnnnnnnnnnnnnnnnnnnnnnnnnnnnnnnnnnnnnnnnnnnnnnnnnnnnnnnnnnnnnnnnnnnnnnnnnnnnnnnnnnnnnnnnnnnnnnnnnnnnnnnnnnnnnnnnnnnnnnnnnnnnnnnnnnnnnnnnnnnnnnnnnnnnnnnnnnnnnnnnnnnnnnnnnnnnnnnnnnnnnnnnnnnnnnnnnnnnnnnnnnnnnnnnnnnnnnnnnnnnnnnnnnnnnnnnnnnnnnnnnnnnnnnnnnnnnnnnnnnnnnnnnnnnnnnnnnnnnnnnnnnnnnnnnnnnnnnnnnnnnnnnnnnnnnnnnnnnnnnnnnnnnnnnnnnnnnnnnnnnnnnnnnnnnnnnnnnnnnnnnnnnnnnnnnnnnnnnnnnnnnnnnnnnnnnnnnnnnnnnnnnnnnnnnnnnnnnnnnnnnnnnnnnnnnnnnnnnnnnnnnnnnnnnnnnnnnnnnnnnnnnnnnnnnnnnnnnnnnnnnnnnnnnnnnnnnnnnnnnnnnnnnnnnnnnnnnnnnnnnnnnnnnnnnnnnnnnnnnnnnnnnnnnnnnnnnnnnnnnnnnnnnnnnnnnnnnnnnnnnnnnnnnnnnnnnnnnnnnnnnnnnnnnnnnnnnnnnnnnnnnnnnnnnnnnnnnnnnnnnnnnnnnnnnnnnnnnnnnnnnnnnnnnnnnnnnnnnnnnnnnnnnnnnnnnnnnnnnnnnnnnnnnnnnnnnnnnnnnnnnnnnnnnnnnnnnnnnnnnnnnnnnnnnnnnnnnnnnnnnnnnnnnnnnnnnnnnnnnnnnnnnnnnnnnnnnnnnnnnnnnnnnnnnnnnnnnnnnnnnnnnnnnnnnnnnnnnnnnnnnnnnnnnnnnnnnnnnnnnnnnnnnnnnnnnnnnnnnnnnnnnnnnnnnnnnnnnnnnnnnnnnnnnnnnnnnnnnnnnnnnnnnnnnnnnnnnnnnnnnnnnnnnnnnnnnnnnnnnnnnnnnnnnnnnnnnnnnnnnnnnnnnnnnnnnnnnnnnnnnnnnnnnnnnnnnnnnnnnnnnnnnnnnnnnnnnnnnnnnnnnnnnnnnnnnnnnnnnnnnnnnnnnnnnnnnnnnnnnnnnnnnnnnnnnnnnnnnnnnnnnnnnnnnnnnnnnnnnnnnnnnnnnnnnnnnnnnnnnnnnnnnnnnnnnnnnnnnnnnnnnnnnnnnnnnnnnnnnnnnnnnnnnnnnnnnnnnnnnnnnnnnnnnnnnnnnnnnnnnnnnnnnnnnnnnnnnnnnnnnnnnnnnnnnnnnnnnnnnnnnnnnnnnnnnnnnnnnnnnnnnnnnnnnnnnnnnnnnnnnnnnnnnnnnnnnnnnnnnnnnnnnnnnnnnnnnnnnnnnnnnnnnnnnnnnnnnnnnnnnnnnnnnnnnnnnnnnnnnnnnnnnnnnnnnnnnnnnnnnnnnnnnnnnnnnnnnnnnnnnnnnnnnnnnnnnnnnnnnnnnnnnnnnnnnnnnnnnnnnnnnnnnnnnnnnnnnnnnnnnnnnnnnnnnnnnnnnnnnnnnnnnnnnnnnnnnnnnnnnnnnnnnnnnnnnnnnnnnnnnnnnnnnnnnnnnnnnnnnnnnnnnnnnnnnnnnnnnnnnnnnnnnnnnnnnnnnnnnnnnnnnnnnnnnnnnnnnnnnnnnnnnnnnnnnnnnnnnnnnnnnnnnnnnnnnnnnnnnnnnnnnnnnnnnnnnnnnnnnnnnnnnnnnnnnnnnnnnnnnnnnnnnnnnnnnnnnnnnnnnnnnnnnnnnnnnnnnnnnnnnnnnnnnnnnnnnnnnnnnnnnnnnnnnnnnnnnnnnnnnnnnnnnnnnnnnnnnnnnnnnnnnnnnnnnnnnnnnnnnnnnnnnnnnnnnnnnnnnnnnnnnnnnnnnnnnnnnnnnnnnnnnnnnnnnnnnnnnnnnnnnnnnnnnnnnnnnnnnnnnnnnnnnnnnnnnnnnnnnnnnnnnnnnnnnnnnnnnnnnnnnnnnnnnnnnnnnnnnnnnnnnnnnnnnnnnnnnnnnnnnnnnnnnnnnnnnnnnnnnnnnnnnnnnnnnnnnnnnnnnnnnnnnnnnnnnnnnnnnnnnnnnnnnnnnnnnnnnnnnnnnnnnnnnnnnnnnnnnnnnnnnnnnnnnnnnnnnnnnnnnnnnnnnnnnnnnnnnnnnnnnnnnnnnnnnnnnnnnnnnnnnnnnnnnnnnnnnnnnnnnnnnnnnnnnnnnnnnnnnnnnnnnnnnnnnnnnnnnnnnnnnnnnnnnnnnnnnnnnnnnnnnnnnnnnnnnnnnnnnnnnnnnnnnnnnnnnnnnnnnnnnnnnnnnnnnnnnnnnnnnnnnnnnnnnnnnnnnnnnnnnnnnnnnnnnnnnnnnnnnnnnnnnnnnnnnnnnnnnnnnnnnnnnnnnnnnnnnnnnnnnnnnnnnnnnnnnnnnnnnnnnnnnnnnnnnnnnnnnnnnnnnnnnnnnnnnnnnnnnnnnnnnnnnnnnnnnnnnnnnnnnnnnnnnnnnnnnnnnnnnnnnnnnnnnnnnnnnnnnnnnnnnnnnnnnnnnnnnnnnnnnnnnnnnnnnnnnnnnnnnnnnnnnnnnnnnnnnnnnnnnnnnnnnnnnnnnnnnnnnnnnnnnnnnnnnnnnnnnnnnnnnnnnnnnnnnnnnnnnnnnnnnnnnnnnnnnnnnnnnnnnnnnnnnnnnnnnnnnnnnnnnnnnnnnnnnnnnnnnnnnnnnnnnnnnnnnnnnnnnnnnnnnnnnnnnnnnnnnnnnnnnnnnnnnnnnnnnnnnnnnnnnnnnnnnnnnnnnnnnnnnnnnnnnnnnnnnnnnnnnnnnnnnnnnnnnnnnnnnnnnnnnnnnnnnnnnnnnnnnnnnnnnnnnnnnnnnnnnnnnnnnnnnnnnnnnnnnnnnnnnnnnnnnnnnnnnnnnnnnnnnnnnnnnnnnnnnnnnnnnnnnnnnnnnnnnnnnnnnnnnnnnnnnnnnnnnnnnnnnnnnnnnnnnnnnnnnnnnnnnnnnnnnnnnnnnnnnnnnnnnnnnnnnnnnnnnnnnnnnnnnnnnnnnnnnnnnnnnnnnnnnnnnnnnnnnnnnnnnnnnnnnnnnnnnnnnnnnnnnnnnnnnnnnnnnnnnnnnnnnnnnnnnnnnnnnnnnnnnnnnnnnnnnnnnnnnnnnnnnnnnnnnnnnnnnnnnnnnnnnnnnnnnnnnnnnnnnnnnnnnnnnnnnnnnnnnnnnnnnnnnnnnnnnnnnnnnnnnnnnnnnnnnnnnnnnnnnnnnnnnnnnnnnnnnnnnnnnnnnnnnnnnnnnnnnnnnnnnnnnnnnnnnnnnnnnnnnnnnnnnnnnnnnnnnnnnnnnnnnnnnnnnnnnnnnnnnnnnnnnnnnnnnnnnnnnnnnnnnnnnnnnnnnnnnnnnnnnnnnnnnnnnnnnnnnnnnnnnnnnnnnnnnnnnnnnnnnnnnnnnnnnnnnnnnnnnnnnnnnnnnnnnnnnnnnnnnnnnnnnnnnnnnnnnnnnnnnnnnnnnnnnnnnnnnnnnnnnnnnnnnnnnnnnnnnnnnnnnnnnnnnnnnnnnnnnnnnnnnnnnnnnnnnnnnnnnnnnnnnnnnnnnnnnnnnnnnnnnnnnnnnnnnnnnnnnnnnnnnnnnnnnnnnnnnnnnnnnnnnnnnnnnnnnnnnnnnnnnnnnnnnnnnnnnnnnnnnnnnnnnnnnnnnnnnnnnnnnnnnnnnnnnnnnnnnnnnnnnnnnnnnnnnnnnnnnnnnnnnnnnnnnnnnnnnnnnnnnnnnnnnnnnnnnnnnnnnnnnnnnnnnnnnnnnnnnnnnnnnnnnnnnnnnnnnnnnnnnnnnnnnnnnnnnnnnnnnnnnnnnnnnnnnnnnnnnnnnnnnnnnnnnnnnnnnnnnnnnnnnnnnnnnnnnnnnnnnnnnnnnnnnnnnnnnnnnnnnnnnnnnnnnnnnnnnnnnnnnnnnnnnnnnnnnnnnnnnnnnnnnnnnnnnnnnnnnnnnnnnnnnnnnnnnnnnnnnnnnnnnnnnnnnnnnnnnnnnnnnnnnnnnnnnnnnnnnnnnnnnnnnnnnnnnnnnnnnnnnnnnnnnnnnnnnnnnnnnnnnnnnnnnnnnnnnnnnnnnnnnnnnnnnnnnnnnnnnnnnnnnnnnnnnnnnnnnnnnnnnnnnnnnnnnnnnnnnnnnnnnnnnnnnnnnnnnnnnnnnnnnnnnnnnnnnnnnnnnnnnnnnnnnnnnnnnnnnnnnnnnnnnnnnnnnnnnnnnnnnnnnnnnnnnnnnnnnnnnnnnnnnnnnnnnnnnnnnnnnnnnnnnnnnnnnnnnnnnnnnnnnnnnnnnnnnnnnnnnnnnnnnnnnnnnnnnnnnnnnnnnnnnnnnnnnnnnnnnnnnnnnnnnnnnnnnnnnnnnnnnnnnnnnnnnnnnnnnnnnnnnnnnnnnnnnnnnnnnnnnnnnnnnnnnnnnnnnnnnnnnnnnnnnnnnnnnnnnnnnnnnnnnnnnnnnnnnnnnnnnnnnnnnnnnnnnnnnnnnnnnnnnnnnnnnnnnnnnnnnnnnnnnnnnnnnnnnnnnnnnnnnnnnnnnnnnnnnnnnnnnnnnnnnnnnnnnnnnnnnnnnnnnnnnnnnnnnnnnnnnnnnnnnnnnnnnnnnnnnnnnnnnnnnnnnnnnnnnnnnnnnnnnnnnnnnnnnnnnnnnnnnnnnnnnnnnnnnnnnnnnnnnnnnnnnnnnnnnnnnnnnnnnnnnnnnnnnnnnnnnnnnnnnnnnnnnnnnnnnnnnnnnnnnnnnnnnnnnnnnnnnnnnnnnnnnnnnnnnnnnnnnnnnnnnnnnnnnnnnnnnnnnnnnnnnnnnnnnnnnnnnnnnnnnnnnnnnnnnnnnnnnnnnnnnnnnnnnnnnnnnnnnnnnnnnnnnnnnnnnnnnnnnnnnnnnnnnnnnnnnnnnnnnnnnnnnnnnnnnnnnnnnnnnnnnnnnnnnnnnnnnnnnnnnnnnnnnnnnnnnnnnnnnnnnnnnnnnnnnnnnnnnnnnnnnnnnnnnnnnnnnnnnnnnnnnnnnnnnnnnnnnnnnnnnnnnnnnnnnnnnnnnnnnnnnnnnnnnnnnnnnnnnnnnnnnnnnnnnnnnnnnnnnnnnnnnnnnnnnnnnnnnnnnnnnnnnnnnnnnnnnnnnnnnnnnnnnnnnnnnnnnnnnnnnnnnnnnnnnnnnnnnnnnnnnnnnnnnnnnnnnnnnnnnnnnnnnnnnnnnnnnnnnnnnnnnnnnnnnnnnnnnnnnnnnnnnnnnnnnnnnnnnnnnnnnnnnnnnnnnnnnnnnnnnnnnnnnnnnnnnnnnnnnnnnnnnnnnnnnnnnnnnnnnnnnnnnnnnnnnnnnnnnnnnnnnnnnnnnnnnnnnnnnnnnnnnnnnnnnnnnnnnnnnnnnnnnnnnnnnnnnnnnnnnnnnnnnnnnnnnnnnnnnnnnnnnnnnnnnnnnnnnnnnnnnnnnnnnnnnnnnnnnnnnnnnnnnnnnnnnnnnnnnnnnnnnnnnnnnnnnnnnnnnnnnnnnnnnnnnnnnnnnnnnnnnnnnnnnnnnnnnnnnnnnnnnnnnnnnnnnnnnnnnnnnnnnnnnnnnnnnnnnnnnnnnnnnnnnnnnnnnnnnnnnnnnnnnnnnnnnnnnnnnnnnnnnnnnnnnnnnnnnnnnnnnnnnnnnnnnnnnnnnnnnnnnnnnnnnnnnnnnnnnnnnnnnnnnnnnnnnnnnnnnnnnnnnnnnnnnnnnnnnnnnnnnnnnnnnnnnnnnnnnnnnnnnnnnnnnnnnnnnnnnnnnnnnnnnnnnnnnnnnnnnnnnnnnnnnnnnnnnnnnnnnnnnnnnnnnnnnnnnnnnnnnnnnnnnnnnnnnnnnnnnnnnnnnnnnnnnnnnnnnnnnnnnnnnnnnnnnnnnnnnnnnnnnnnnnnnnnnnnnnnnnnnnnnnnnnnnnnnnnnnnnnnnnnnnnnnnnnnnnnnnnnnnnnnnnnnnnnnnnnnnnnnnnnnnnnnnnnnnnnnnnnnnnnnnnnnnnnnnnnnnnnnnnnnnnnnnnnnnnnnnnnnnnnnnnnnnnnnnnnnnnnnnnnnnnnnnnnnnnnnnnnnnnnnnnnnnnnnnnnnnnnnnnnnnnnnnnnnnnnnnnnnnnnnnnnnnnnnnnnnnnnnnnnnnnnnnnnnnnnnnnnnnnnnnnnnnnnnnnnnnnnnnnnnnnnnnnnnnnnnnnnnnnnnnnnnnnnnnnnnnnnnnnnnnnnnnnnnnnnnnnnnnnnnnnnnnnnnnnnnnnnnnnnnnnnnnnnnnnnnnnnnnnnnnnnnnnnnnnnnnnnnnnnnnnnnnnnnnnnnnnnnnnnnnnnnnnnnnnnnnnnnnnnnnnnnnnnnnnnnnnnnnnnnnnnnnnnnnnnnnnnnnnnnnnnnnnnnnnnnnnnnnnnnnnnnnnnnnnnnnnnnnnnnnnnnnnnnnnnnnnnnnnnnnnnnnnnnnnnnnnnnnnnnnnnnnnnnnnnnnnnnnnnnnnnnnnnnnnnnnnnnnnnnnnnnnnnnnnnnnnnnnnnnnnnnnnnnnnnnnnnnnnnnnnnnnnnnnnnnnnnnnnnnnnnnnnnnnnnnnnnnnnnnnnnnnnnnnnnnnnnnnnnnnnnnnnnnnnnnnnnnnnnnnnnnnnnnnnnnnnnnnnnnnnnnnnnnnnnnnnnnnnnnnnnnnnnnnnnnnnnnnnnnnnnnnnnnnnnnnnnnnnnnnnnnnnnnnnnnnnnnnnnnnnnnnnnnnnnnnnnnnnnnnnnnnnnnnnnnnnnnnnnnnnnnnnnnnnnnnnnnnnnnnnnnnnnnnnnnnnnnnnnnnnnnnnnnnnnnnnnnnnnnnnnnnnnnnnnnnnnnnnnnnnnnnnnnnnnnnnnnnnnnnnnnnnnnnnnnnnnnnnnnnnnnnnnnnnnnnnnnnnnnnnnnnnnnnnnnnnnnnnnnnnnnnnnnnnnnnnnnnnnnnnnnnnnnnnnnnnnnnnnnnnnnnnnnnnnnnnnnnnnnnnnnnnnnnnnnnnnnnnnnnnnnnnnnnnnnnnnnnnnnnnnnnnnnnnnnnnnnnnnnnnnnnnnnnnnnnnnnnnnnnnnnnnnnnnnnnnnnnnnnnnnnnnnnnnnnnnnnnnnnnnnnnnnnnnnnnnnnnnnnnnnnnnnnnnnnnnnnnnnnnnnnnnnnnnnnnnnnnnnnnnnnnnnnnnnnnnnnnnnnnnnnnnnnnnnnnnnnnnnnnnnnnnnnnnnnnnnnnnnnnnnnnnnnnnnnnnnnnnnnnnnnnnnnnnnnnnnnnnnnnnnnnnnnnnnnnnnnnnnnnnnnnnnnnnnnnnnnnnnnnnnnnnnnnnnnnnnnnnnnnnnnnnnnnnnnnnnnnnnnnnnnnnnnnnnnnnnnnnnnnnnnnnnnnnnnnnnnnnnnnnnnnnnnnnnnnnnnnnnnnnnnnnnnnnnnnnnnnnnnnnnnnnnnnnnnnnnnnnnnnnnnnnnnnnnnnnnnnnnnnnnnnnnnnnnnnnnnnnnnnnnnnnnnnnnnnnnnnnnnnnnnnnnnnnnnnnnnnnnnnnnnnnnnnnnnnnnnnnnnnnnnnnnnnnnnnnnnnnnnnnnnnnnnnnnnnnnnnnnnnnnnnnnnnnnnnnnnnnnnnnnnnnnnnnnnnnnnnnnnnnnnnnnnnnnnnnnnnnnnnnnnnnnnnnnnnnnnnnnnnnnnnnnnnnnnnnnnnnnnnnnnnnnnnnnnnnnnnnnnnnnnnnnnnnnnnnnnnnnnnnnnnnnnnnnnnnnnnnnnnnnnnnnnnnnnnnnnnnnnnnnnnnnnnnnnnnnnnnnnnnnnnnnnnnnnnnnnnnnnnnnnnnnnnnnnnnnnnnnnnnnnnnnnnnnnnnnnnnnnnnnnnnnnnnnnnnnnnnnnnnnnnnnnnnnnnnnnnnnnnnnnnnnnnnnnnnnnnnnnnnnnnnnnnnnnnnnnnnnnnnnnnnnnnnnnnnnnnnnnnnnnnnnnnnnnnnnnnnnnnnnnnnnnnnnnnnnnnnnnnnnnnnnnnnnnnnnnnnnnnnnnnnnnnnnnnnnnnnnnnnnnnnnnnnnnnnnnnnnnnnnnnnnnnnnnnnnnnnnnnnnnnnnnnnnnnnnnnnnnnnnnnnnnnnnnnnnnnnnnnnnnnnnnnnnnnnnnnnnnnnnnnnnnnnnnnnnnnnnnnnnnnnnnnnnnnnnnnnnnnnnnnnnnnnnnnnnnnnnnnnnnnnnnnnnnnnnnnnnnnnnnnnnnnnnnnnnnnnnnnnnnnnnnnnnnnnnnnnnnnnnnnnnnnnnnnnnnnnnnnnnnnnnnnnnnnnnnnnnnnnnnnnnnnnnnnnnnnnnnnnnnnnnnnnnnnnnnnnnnnnnnnnnnnnnnnnnnnnnnnnnnnnnnnnnnnnnnnnnnnnnnnnnnnnnnnnnnnnnnnnnnnnnnnnnnnnnnnnnnnnnnnnnnnnnnnnnnnnnnnnnnnnnnnnnnnnnnnnnnnnnnnnnnnnnnnnnnnnnnnnnnnnnnnnnnnnnnnnnnnnnnnnnnnnnnnnnnnnnnnnnnnnnnnnnnnnnnnnnnnnnnnnnnnnnnnnnnnnnnnnnnnnnnnnnnnnnnnnnnnnnnnnnnnnnnnnnnnnnnnnnnnnnnnnnnnnnnnnnnnnnnnnnnnnnnnnnnnnnnnnnnnnnnnnnnnnnnnnnnnnnnnnnnnnnnnnnnnnnnnnnnnnnnnnnnnnnnnnnnnnnnnnnnnnnnnnnnnnnnnnnnnnnnnnnnnnnnnnnnnnnnnnnnnnnnnnnnnnnnnnnnnnnnnnnnnnnnnnnnnnnnnnnnnnnnnnnnnnnnnnnnnnnnnnnnnnnnnnnnnnnnnnnnnnnnnnnnnnnnnnnnnnnnnnnnnnnnnnnnnnnnnnnnnnnnnnnnnnnnnnnnnnnnnnnnnnnnnnnnnnnnnnnnnnnnnnnnnnnnnnnnnnnnnnnnnnnnnnnnnnnnnnnnnnnnnnnnnnnnnnnnnnnnnnnnnnnnnnnnnnnnnnnnnnnnnnnnnnnnnnnnnnnnnnnnnnnnnnnnnnnnnnnnnnnnnnnnnnnnnnnnnnnnnnnnnnnnnnnnnnnnnnnnnnnnnnnnnnnnnnnnnnnnnnnnnnnnnnnnnnnnnnnnnnnnnnnnnnnnnnnnnnnnnnnnnnnnnnnnnnnnnnnnnnnnnnnnnnnnnnnnnnnnnnnnnnnnnnnnnnnnnnnnnnnnnnnnnnnnnnnnnnnnnnnnnnnnnnnnnnnnnnnnnnnnnnnnnnnnnnnnnnnnnnnnnnnnnnnnnnnnnnnnnnnnnnnnnnnnnnnnnnnnnnnnnnnnnnnnnnnnnnnnnnnnnnnnnnnnnnnnnnnnnnnnnnnnnnnnnnnnnnnnnnnnnnnnnnnnnnnnnnnnnnnnnnnnnnnnnnnnnnnnnnnnnnnnnnnnnnnnnnnnnnnnnnnnnnnnnnnnnnnnnnnnnnnnnnnnnnnnnnnnnnnnnnnnnnnnnnnnnnnnnnnnnnnnnnnnnnnnnnnnnnnnnnnnnnnnnnnnnnnnnnnnnnnnnnnnnnnnnnnnnnnnnnnnnnnnnnnnnnnnnnnnnnnnnnnnnnnnnnnnnnnnnnnnnnnnnnnnnnnnnnnnnnnnnnnnnnnnnnnnnnnnnnnnnnnnnnnnnnnnnnnnnnnnnnnnnnnnnnnnnnnnnnnnnnnnnnnnnnnnnnnnnnnnnnnnnnnnnnnnnnnnnnnnnnnnnnnnnnnnnnnnnnnnnnnnnnnnnnnnnnnnnnnnnnnnnnnnnnnnnnnnnnnnnnnnnnnnnnnnnnnnnnnnnnnnnnnnnnnnnnnnnnnnnnnnnnnnnnnnnnnnnnnnnnnnnnnnnnnnnnnnnnnnnnnnnnnnnnnnnnnnnnnnnnnnnnnnnnnnnnnnnnnnnnnnnnnnnnnnnnnnnnnnnnnnnnnnnnnnnnnnnnnnnnnnnnnnnnnnnnnnnnnnnnnnnnnnnnnnnnnnnnnnnnnnnnnnnnnnnnnnnnnnnnnnnnnnnnnnnnnnnnnnnnnnnnnnnnnnnnnnnnnnnnnnnnnnnnnnnnnnnnnnnnnnnnnnnnnnnnnnnnnnnnnnnnnnnnnnnnnnnnnnnnnnnnnnnnnnnnnnnnnnnnnnnnnnnnnnnnnnnnnnnnnnnnnnnnnnnnnnnnnnnnnnnnnnnnnnnnnnnnnnnnnnnnnnnnnnnnnnnnnnnnnnnnnnnnnnnnnnnnnnnnnnnnnnnnnnnnnnnnnnnnnnnnnnnnnnnnnnnnnnnnnnnnnnnnnnnnnnnnnnnnnnnnnnnnnnnnnnnnnnnnnnnnnnnnnnnnnnnnnnnnnnnnnnnnnnnnnnnnnnnnnnnnnnnnnnnnnnnnnnnnnnnnnnnnnnnnnnnnnnnnnnnnnnnnnnnnnnnnnnnnnnnnnnnnnnnnnnnnnnnnnnnnnnnnnnnnnnnnnnnnnnnnnnnnnnnnnnnnnnnnnnnnnnnnnnnnnnnnnnnnnnnnnnnnnnnnnnnnnnnnnnnnnnnnnnnnnnnnnnnnnnnnnnnnnnnnnnnnnnnnnnnnnnnnnnnnnnnnnnnnnnnnnnnnnnnnnnnnnnnnnnnnnnnnnnnnnnnnnnnnnnnnnnnnnnnnnnnnnnnnnnnnnnnnnnnnnnnnnnnnnnnnnnnnnnnnnnnnnnnnnnnnnnnnnnnnnnnnnnnnnnnnnnnnnnnnnnnnnnnnnnnnnnnnnnnnnnnnnnnnnnnnnnnnnnnnnnnnnnnnnnnnnnnnnnnnnnnnnnnnnnnnnnnnnnnnnnnnnnnnnnnnnnnnnnnnnnnnnnnnnnnnnnnnnnnnnnnnnnnnnnnnnnnnnnnnnnnnnnnnnnnnnnnnnnnnnnnnnnnnnnnnnnnnnnnnnnnnnnnnnnnnnnnnnnnnnnnnnnnnnnnnnnnnnnnnnnnnnnnnnnnnnnnnnnnnnnnnnnnnnnnnnnnnnnnnnnnnnnnnnnnnnnnnnnnnnnnnnnnnnnnnnnnnnnnnnnnnnnnnnnnnnnnnnnnnnnnnnnnnnnnnnnnnnnnnnnnnnnnnnnnnnnnnnnnnnnnnnnnnnnnnnnnnnnnnnnnnnnnnnnnnnnnnnnnnnnnnnnnnnnnnnnnnnnnnnnnnnnnnnnnnnnnnnnnnnnnnnnnnnnnnnnnnnnnnnnnnnnnnnnnnnnnnnnnnnnnnnnnnnnnnnnnnnnnnnnnnnnnnnnnnnnnnnnnnnnnnnnnnnnnnnnnnnnnnnnnnnnnnnnnnnnnnnnnnnnnnnnnnnnnnnnnnnnnnnnnnnnnnnnnnnnnnnnnnnnnnnnnnnnnnnnnnnnnnnnnnnnnnnnnnnnnnnnnnnnnnnnnnnnnnnnnnnnnnnnnnnnnnnnnnnnnnnnnnnnnnnnnnnnnnnnnnnnnnnnnnnnnnnnnnnnnnnnnnnnnnnnnnnnnnnnnnnnnnnnnnnnnnnnnnnnnnnnnnnnnnnnnnnnnnnnnnnnnnnnnnnnnnnnnnnnnnnnnnnnnnnnnnnnnnnnnnnnnnnnnnnnnnnnnnnnnnnnnnnnnnnnnnnnnnnnnnnnnnnnnnnnnnnnnnnnnnnnnnnnnnnnnnnnnnnnnnnnnnnnnnnnnnnnnnnnnnnnnnnnnnnnnnnnnnnnnnnnnnnnnnnnnnnnnnnnnnnnnnnnnnnnnnnnnnnnnnnnnnnnnnnnnnnnnnnnnnnnnnnnnnnnnnnnnnnnnnnnnnnnnnnnnnnnnnnnnnnnnnnnnnnnnnnnnnnnnnnnnnnnnnnnnnnnnnnnnnnnnnnnnnnnnnnnnnnnnnnnnnnnnnnnnnnnnnnnnnnnnnnnnnnnnnnnnnnnnnnnnnnnnnnnnnnnnnnnnnnnnnnnnnnnnnnnnnnnnnnnnnnnnnnnnnnnnnnnnnnnnnnnnnnnnnnnnnnnnnnnnnnnnnnnnnnnnnnnnnnnnnnnnnnnnnnnnnnnnnnnnnnnnnnnnnnnnnnnnnnnnnnnnnnnnnnnnnnnnnnnnnnnnnnnnnnnnnnnnnnnnnnnnnnnnnnnnnnnnnnnnnnnnnnnnnnnnnnnnnnnnnnnnnnnnnnnnnnnnnnnnnnnnnnnnnnnnnnnnnnnnnnnnnnnnnnnnnnnnnnnnnnnnnnnnnnnnnnnnnnnnnnnnnnnnnnnnnnnnnnnnnnnnnnnnnnnnnnnnnnnnnnnnnnnnnnnnnnnnnnnnnnnnnnnnnnnnnnnnnnnnnnnnnnnnnnnnnnnnnnnnnnnnnnnnnnnnnnnnnnnnnnnnnnnnnnnnnnnnnnnnnnnnnnnnnnnnnnnnnnnnnnnnnnnnnnnnnnnnnnnnnnnnnnnnnnnnnnnnnnnnnnnnnnnnnnnnnnnnnnnnnnnnnnnnnnnnnnnnnnnnnnnnnnnnnnnnnnnnnnnnnnnnnnnnnnnnnnnnnnnnnnnnnnnnnnnnnnnnnnnnnnnnnnnnnnnnnnnnnnnnnnnnnnnnnnnnnnnnnnnnnnnnnnnnnnnnnnnnnnnnnnnnnnnnnnnnnnnnnnnnnnnnnnnnnnnnnnnnnnnnnnnnnnnnnnnnnnnnnnnnnnnnnnnnnnnnnnnnnnnnnnnnnnnnnnnnnnnnnnnnnnnnnnnnnnnnnnnnnnnnnnnnnnnnnnnnnnnnnnnnnnnnnnnnnnnnnnnnnnnnnnnnnnnnnnnnnnnnnnnnnnnnnnnnnnnnnnnnnnnnnnnnnnnnnnnnnnnnnnnnnnnnnnnnnnnnnnnnnnnnnnnnnnnnnnnnnnnnnnnnnnnnnnnnnnnnnnnnnnnnnnnnnnnnnnnnnnnnnnnnnnnnnnnnnnnnnnnnnnnnnnnnnnnnnnnnnnnnnnnnnnnnnnnnnnnnnnnnnnnnnnnnnnnnnnnnnnnnnnnnnnnnnnnnnnnnnnnnnnnnnnnnnnnnnnnnnnnnnnnnnnnnnnnnnnnnnnnnnnnnnnnnnnnnnnnnnnnnnnnnnnnnnnnnnnnnnnnnnnnnnnnnnnnnnnnnnnnnnnnnnnnnnnnnnnnnnnnnnnnnnnnnnnnnnnnnnnnnnnnnnnnnnnnnnnnnnnnnnnnnnnnnnnnnnnnnnnnnnnnnnnnnnnnnnnnnnnnnnnnnnnnnnnnnnnnnnnnnnnnnnnnnnnnnnnnnnnnnnnnnnnnnnnnnnnnnnnnnnnnnnnnnnnnnnnnnnnnnnnnnnnnnnnnnnnnnnnnnnnnnnnnnnnnnnnnnnnnnnnnnnnnnnnnnnnnnnnnnnnnnnnnnnnnnnnnnnnnnnnnnnnnnnnnnnnnnnnnnnnnnnnnnnnnnnnnnnnnnnnnnnnnnnnnnnnnnnnnnnnnnnnnnnnnnnnnnnnnnnnnnnnnnnnnnnnnnnnnnnnnnnnnnnnnnnnnnnnnnnnnnnnnnnnnnnnnnnnnnnnnnnnnnnnnnnnnnnnnnnnnnnnnnnnnnnnnnnnnnnnnnnnnnnnnnnnnnnnnnnnnnnnnnnnnnnnnnnnnnnnnnnnnnnnnnnnnnnnnnnnnnnnnnnnnnnnnnnnnnnnnnnnnnnnnnnnnnnnnnnnnnnnnnnnnnnnnnnnnnnnnnnnnnnnnnnnnnnnnnnnnnnnnnnnnnnnnnnnnnnnnnnnnnnnnnnnnnnnnnnnnnnnnnnnnnnnnnnnnnnnnnnnnnnnnnnnnnnnnnnnnnnnnnnnnnnnnnnnnnnnnnnnnnnnnnnnnnnnnnnnnnnnnnnnnnnnnnnnnnnnnnnnnnnnnnnnnnnnnnnnnnnnnnnnnnnnnnnnnnnnnnnnnnnnnnnnnnnnnnnnnnnnnnnnnnnnnnnnnnnnnnnnnnnnnnnnnnnnnnnnnnnnnnnnnnnnnnnnnnnnnnnnnnnnnnnnnnnnnnnnnnnnnnnnnnnnnnnnnnnnnnnnnnnnnnnnnnnnnnnnnnnnnnnnnnnnnnnnnnnnnnnnnnnnnnnnnnnnnnnnnnnnnnnnnnnnnnnnnnnnnnnnnnnnnnnnnnnnnnnnnnnnnnnnnnnnnnnnnnnnnnnnnnnnnnnnnnnnnnnnnnnnnnnnnnnnnnnnnnnnnnnnnnnnnnnnnnnnnnnnnnnnnnnnnnnnnnnnnnnnnnnnnnnnnnnnnnnnnnnnnnnnnnnnnnnnnnnnnnnnnnnnnnnnnnnnnnnnnnnnnnnnnnnnnnnnnnnnnnnnnnnnnnnnnnnnnnnnnnnnnnnnnnnnnnnnnnnnnnnnnnnnnnnnnnnnnnnnnnnnnnnnnnnnnnnnnnnnnnnnnnnnnnnnnnnnnnnnnnnnnnnnnnnnnnnnnnnnnnnnnnnnnnnnnnnnnnnnnnnnnnnnnnnnnnnnnnnnnnnnnnnnnnnnnnnnnnnnnnnnnnnnnnnnnnnnnnnnnnnnnnnnnnnnnnnnnnnnnnnnnnnnnnnnnnnnnnnnnnnnnnnnnnnnnnnnnnnnnnnnnnnnnnnnnnnnnnnnnnnnnnnnnnnnnnnnnnnnnnnnnnnnnnnnnnnnnnnnnnnnnnnnnnnnnnnnnnnnnnnnnnnnnnnnnnnnnnnnnnnnnnnnnnnnnnnnnnnnnnnnnnnnnnnnnnnnnnnnnnnnnnnnnnnnnnnnnnnnnnnnnnnnnnnnnnnnnnnnnnnnnnnnnnnnnnnnnnnnnnnnnnnnnnnnnnnnnnnnnnnnnnnnnnnnnnnnnnnnnnnnnnnnnnnnnnnnnnnnnnnnnnnnnnnnnnnnnnnnnnnnnnnnnnnnnnnnnnnnnnnnnnnnnnnnnnnnnnnnnnnnnnnnnnnnnnnnnnnnnnnnnnnnnnnnnnnnnnnnnnnnnnnnnnnnnnnnnnnnnnnnnnnnnnnnnnnnnnnnnnnnnnnnnnnnnnnnnnnnnnnnnnnnnnnnnnnnnnnnnnnnnnnnnnnnnnnnnnnnnnnnnnnnnnnnnnnnnnnnnnnnnnnnnnnnnnnnnnnnnnnnnnnnnnnnnnnnnnnnnnnnnnnnnnnnnnnnnnnnnnnnnnnnnnnnnnnnnnnnnnnnnnnnnnnnnnnnnnnnnnnnnnnnnnnnnnnnnnnnnnnnnnnnnnnnnnnnnnnnnnnnnnnnnnnnnnnnnnnnnnnnnnnnnnnnnnnnnnnnnnnnnnnnnnnnnnnnnnnnnnnnnnnnnnnnnnnnnnnnnnnnnnnnnnnnnnnnnnnnnnnnnnnnnnnnnnnnnnnnnnnnnnnnnnnnnnnnnnnnnnnnnnnnnnnnnnnnnnnnnnnnnnnnnnnnnnnnnnnnnnnnnnnnnnnnnnnnnnnnnnnnnnnnnnnnnnnnnnnnnnnnnnnnnnnnnnnnnnnnnnnnnnnnnnnnnnnnnnnnnnnnnnnnnnnnnnnnnnnnnnnnnnnnnnnnnnnnnnnnnnnnnnnnnnnnnnnnnnnnnnnnnnnnnnnnnnnnnnnnnnnnnnnnnnnnnnnnnnnnnnnnnnnnnnnnnnnnnnnnnnnnnnnnnnnnnnnnnnnnnnnnnnnnnnnnnnnnnnnnnnnnnnnnnnnnnnnnnnnnnnnnnnnnnnnnnnnnnnnnnnnnnnnnnnnnnnnnnnnnnnnnnnnnnnnnnnnnnnnnnnnnnnnnnnnnnnnnnnnnnnnnnnnnnnnnnnnnnnnnnnnnnnnnnnnnnnnnnnnnnnnnnnnnnnnnnnnnnnnnnnnnnnnnnnnnnnnnnnnnnnnnnnnnnnnnnnnnnnnnnnnnnnnnnnnnnnnnnnnnnnnnnnnnnnnnnnnnnnnnnnnnnnnnnnnnnnnnnnnnnnnnnnnnnnnnnnnnnnnnnnnnnnnnnnnnnnnnnnnnnnnnnnnnnnnnnnnnnnnnnnnnnnnnnnnnnnnnnnnnnnnnnnnnnnnnnnnnnnnnnnnnnnnnnnnnnnnnnnnnnnnnnnnnnnnnnnnnnnnnnnnnnnnnnnnnnnnnnnnnnnnnnnnnnnnnnnnnnnnnnnnnnnnnnnnnnnnnnnnnnnnnnnnnnnnnnnnnnnnnnnnnnnnnnnnnnnnnnnnnnnnnnnnnnnnnnnnnnnnnnnnnnnnnnnnnnnnnnnnnnnnnnnnnnnnnnnnnnnnnnnnnnnnnnnnnnnnnnnnnnnnnnnnnnnnnnnnnnnnnnnnnnnnnnnnnnnnnnnnnnnnnnnnnnnnnnnnnnnnnnnnnnnnnnnnnnnnnnnnnnnnnnnnnnnnnnnnnnnnnnnnnnnnnnnnnnnnnnnnnnnnnnnnnnnnnnnnnnnnnnnnnnnnnnnnnnnnnnnnnnnnnnnnnnnnnnnnnnnnnnnnnnnnnnnnnnnnnnnnnnnnnnnnnnnnnnnnnnnnnnnnnnnnnnnnnnnnnnnnnnnnnnnnnnnnnnnnnnnnnnnnnnnnnnnnnnnnnnnnnnnnnnnnnnnnnnnnnnnnnnnnnnnnnnnnnnnnnnnnnnnnnnnnnnnnnnnnnnnnnnnnnnnnnnnnnnnnnnnnnnnnnnnnnnnnnnnnnnnnnnnnnnnnnnnnnnnnnnnnnnnnnnnnnnnnnnnnnnnnnnnnnnnnnnnnnnnnnnnnnnnnnnnnnnnnnnnnnnnnnnnnnnnnnnnnnnnnnnnnnnnnnnnnnnnnnnnnnnnnnnnnnnnnnnnnnnnnnnnnnnnnnnnnnnnnnnnnnnnnnnnnnnnnnnnnnnnnnnnnnnnnnnnnnnnnnnnnnnnnnnnnnnnnnnnnnnnnnnnnnnnnnnnnnnnnnnnnnnnnnnnnnnnnnnnnnnnnnnnnnnnnnnnnnnnnnnnnnnnnnnnnnnnnnnnnnnnnnnnnnnnnnnnnnnnnnnnnnnnnnnnnnnnnnnnnnnnnnnnnnnnnnnnnnnnnnnnnnnnnnnnnnnnnnnnnnnnnnnnnnnnnnnnnnnnnnnnnnnnnnnnnnnnnnnnnnnnnnnnnnnnnnnnnnnnnnnnnnnnnnnnnnnnnnnnnnnnnnnnnnnnnnnnnnnnnnnnnnnnnnnnnnnnnnnnnnnnnnnnnnnnnnnnnnnnnnnnnnnnnnnnnnnnnnnnnnnnnnnnnnnnnnnnnnnnnnnnnnnnnnnnnnnnnnnnnnnnnnnnnnnnnnnnnnnnnnnnnnnnnnnnnnnnnnnnnnnnnnnnnnnnnnnnnnnnnnnnnnnnnnnnnnnnnnnnnnnnnnnnnnnnnnnnnnnnnnnnnnnnnnnnnnnnnnnnnnnnnnnnnnnnnnnnnnnnnnnnnnnnnnnnnnnnnnnnnnnnnnnnnnnnnnnnnnnnnnnnnnnnnnnnnnnnnnnnnnnnnnnnnnnnnnnnnnnnnnnnnnnnnnnnnnnnnnnnnnnnnnnnnnnnnnnnnnnnnnnnnnnnnnnnnnnnnnnnnnnnnnnnnnnnnnnnnnnnnnnnnnnnnnnnnnnnnnnnnnnnnnnnnnnnnnnnnnnnnnnnnnnnnnnnnnnnnnnnnnnnnnnnnnnnnnnnnnnnnnnnnnnnnnnnnnnnnnnnnnnnnnnnnnnnnnnnnnnnnnnnnnnnnnnnnnnnnnnnnnnnnnnnnnnnnnnnnnnnnnnnnnnnnnnnnnnnnnnnnnnnnnnnnnnnnnnnnnnnnnnnnnnnnnnnnnnnnnnnnnnnnnnnnnnnnnnnnnnnnnnnnnnnnnnnnnnnnnnnnnnnnnnnnnnnnnnnnnnnnnnnnnnnnnnnnnnnnnnnnnnnnnnnnnnnnnnnnnnnnnnnnnnnnnnnnnnnnnnnnnnnnnnnnnnnnnnnnnnnnnnnnnnnnnnnnnnnnnnnnnnnnnnnnnnnnnnnnnnnnnnnnnnnnnnnnnnnnnnnnnnnnnnnnnnnnnnnnnnnnnnnnnnnnnnnnnnnnnnnnnnnnnnnnnnnnnnnnnnnnnnnnnnnnnnnnnnnnnnnnnnnnnnnnnnnnnnnnnnnnnnnnnnnnnnnnnnnnnnnnnnnnnnnnnnnnnnnnnnnnnnnnnnnnnnnnnnnnnnnnnnnnnnnnnnnnnnnnnnnnnnnnnnnnnnnnnnnnnnnnnnnnnnnnnnnnnnnnnnnnnnnnnnnnnnnnnnnnnnnnnnnnnnnnnnnnnnnnnnnnnnnnnnnnnnnnnnnnnnnnnnnnnnnnnnnnnnnnnnnnnnnnnnnnnnnnnnnnnnnnnnnnnnnnnnnnnnnnnnnnnnnnnnnnnnnnnnnnnnnnnnnnnnnnnnnnnnnnnnnnnnnnnnnnnnnnnnnnnnnnnnnnnnnnnnnnnnnnnnnnnnnnnnnnnnnnnnnnnnnnnnnnnnnnnnnnnnnnnnnnnnnnnnnnnnnnnnnnnnnnnnnnnnnnnnnnnnnnnnnnnnnnnnnnnnnnnnnnnnnnnnnnnnnnnnnnnnnnnnnnnnnnnnnnnnnnnnnnnnnnnnnnnnnnnnnnnnnnnnnnnnnnnnnnnnnnnnnnnnnnnnnnnnnnnnnnnnnnnnnnnnnnnnnnnnnnnnnnnnnnnnnnnnnnnnnnnnnnnnnnnnnnnnnnnnnnnnnnnnnnnnnnnnnnnnnnnnnnnnnnnnnnnnnnnnnnnnnnnnnnnnnnnnnnnnnnnnnnnnnnnnnnnnnnnnnnnnnnnnnnnnnnnnnnnnnnnnnnnnnnnnnnnnnnnnnnnnnnnnnnnnnnnnnnnnnnnnnnnnnnnnnnnnnnnnnnnnnnnnnnnnnnnnnnnnnnnnnnnnnnnnnnnnnnnnnnnnnnnnnnnnnnnnnnnnnnnnnnnnnnnnnnnnnnnnnnnnnnnnnnnnnnnnnnnnnnnnnnnnnnnnnnnnnnnnnnnnnnnnnnnnnnnnnnnnnnnnnnnnnnnnnnnnnnnnnnnnnnnnnnnnnnnnnnnnnnnnnnnnnnnnnnnnnnnnnnnnnnnnnnnnnnnnnnnnnnnnnnnnnnnnnnnnnnnnnnnnnnnnnnnnnnnnnnnnnnnnnnnnnnnnnnnnnnnnnnnnnnnnnnnnnnnnnnnnnnnnnnnnnnnnnnnnnnnnnnnnnnnnnnnnnnnnnnnnnnnnnnnnnnnnnnnnnnnnnnnnnnnnnnnnnnnnnnnnnnnnnnnnnnnnnnnnnnnnnnnnnnnnnnnnnnnnnnnnnnnnnnnnnnnnnnnnnnnnnnnnnnnnnnnnnnnnnnnnnnnnnnnnnnnnnnnnnnnnnnnnnnnnnnnnnnnnnnnnnnnnnnnnnnnnnnnnnnnnnnnnnnnnnnnnnnnnnnnnnnnnnnnnnnnnnnnnnnnnnnnnnnnnnnnnnnnnnnnnnnnnnnnnnnnnnnnnnnnnnnnnnnnnnnnnnnnnnnnnnnnnnnnnnnnnnnnnnnnnnnnnnnnnnnnnnnnnnnnnnnnnnnnnnnnnnnnnnnnnnnnnnnnnnnnnnnnnnnnnnnnnnnnnnnnnnnnnnnnnnnnnnnnnnnnnnnnnnnnnnnnnnnnnnnnnnnnnnnnnnnnnnnnnnnnnnnnnnnnnnnnnnnnnnnnnnnnnnnnnnnnnnnnnnnnnnnnnnnnnnnnnnnnnnnnnnnnnnnnnnnnnnnnnnnnnnnnnnnnnnnnnnnnnnnnnnnnnnnnnnnnnnnnnnnnnnnnnnnnnnnnnnnnnnnnnnnnnnnnnnnnnnnnnnnnnnnnnnnnnnnnnnnnnnnnnnnnnnnnnnnnnnnnnnnnnnnnnnnnnnnnnnnnnnnnnnnnnnnnnnnnnnnnnnnnnnnnnnnnnnnnnnnnnnnnnnnnnnnnnnnnnnnnnnnnnnnnnnnnnnnnnnnnnnnnnnnnnnnnnnnnnnnnnnnnnnnnnnnnnnnnnnnnnnnnnnnnnnnnnnnnnnnnnnnnnnnnnnnnnnnnnnnnnnnnnnnnnnnnnnnnnnnnnnnnnnnnnnnnnnnnnnnnnnnnnnnnnnnnnnnnnnnnnnnnnnnnnnnnnnnnnnnnnnnnnnnnnnnnnnnnnnnnnnnnnnnnnnnnnnnnnnnnnnnnnnnnnnnnnnnnnnnnnnnnnnnnnnnnnnnnnnnnnnnnnnnnnnnnnnnnnnnnnnnnnnnnnnnnnnnnnnnnnnnnnnnnnnnnnnnnnnnnnnnnnnnnnnnnnnnnnnnnnnnnnnnnnnnnnnnnnnnnnnnnnnnnnnnnnnnnnnnnnnnnnnnnnnnnnnnnnnnnnnnnnnnnnnnnnnnnnnnnnnnnnnnnnnnnnnnnnnnnnnnnnnnnnnnnnnnnnnnnnnnnnnnnnnnnnnnnnnnnnnnnnnnnnnnnnnnnnnnnnnnnnnnnnnnnnnnnnnnnnnnnnnnnnnnnnnnnnnnnnnnnnnnnnnnnnnnnnnnnnnnnnnnnnnnnnnnnnnnnnnnnnnnnnnnnnnnnnnnnnnnnnnnnnnnnnnnnnnnnnnnnnnnnnnnnnnnnnnnnnnnnnnnnnnnnnnnnnnnnnnnnnnnnnnnnnnnnnnnnnnnnnnnnnnnnnnnnnnnnnnnnnnnnnnnnnnnnnnnnnnnnnnnnnnnnnnnnnnnnnnnnnnnnnnnnnnnnnnnnnnnnnnnnnnnnnnnnnnnnnnnnnnnnnnnnnnnnnnnnnnnnnnnnnnnnnnnnnnnnnnnnnnnnnnnnnnnnnnnnnnnnnnnnnnnnnnnnnnnnnnnnnnnnnnnnnnnnnnnnnnnnnnnnnnnnnnnnnnnnnnnnnnnnnnnnnnnnnnnnnnnnnnnnnnnnnnnnnnnnnnnnnnnnnnnnnnnnnnnnnnnnnnnnnnnnnnnnnnnnnnnnnnnnnnnnnnnnnnnnnnnnnnnnnnnnnnnnnnnnnnnnnnnnnnnnnnnnnnnnnnnnnnnnnnnnnnnnnnnnnnnnnnnnnnnnnnnnnnnnnnnnnnnnnnnnnnnnnnnnnnnnnnnnnnnnnnnnnnnnnnnnnnnnnnnnnnnnnnnnnnnnnnnnnnnnnnnnnnnnnnnnnnnnnnnnnnnnnnnnnnnnnnnnnnnnnnnnnnnnnnnnnnnnnnnnnnnnnnnnnnnnnnnnnnnnnnnnnnnnnnnnnnnnnnnnnnnnnnnnnnnnnnnnnnnnnnnnnnnnnnnnnnnnnnnnnnnnnnnnnnnnnnnnnnnnnnnnnnnnnnnnnnnnnnnnnnnnnnnnnnnnnnnnnnnnnnnnnnnnnnnnnnnnnnnnnnnnnnnnnnnnnnnnnnnnnnnnnnnnnnnnnnnnnnnnnnnnnnnnnnnnnnnnnnnnnnnnnnnnnnnnnnnnnnnnnnnnnnnnnnnnnnnnnnnnnnnnnnnnnnnnnnnnnnnnnnnnnnnnnnnnnnnnnnnnnnnnnnnnnnnnnnnnnnnnnnnnnnnnnnnnnnnnnnnnnnnnnnnnnnnnnnnnnnnnnnnnnnnnnnnnnnnnnnnnnnnnnnnnnnnnnnnnnnnnnnnnnnnnnnnnnnnnnnnnnnnnnnnnnnnnnnnnnnnnnnnnnnnnnnnnnnnnnnnnnnnnnnnnnnnnnnnnnnnnnnnnnnnnnnnnnnnnnnnnnnnnnnnnnnnnnnnnnnnnnnnnnnnnnnnnnnnnnnnnnnnnnnnnnnnnnnnnnnnnnnnnnnnnnnnnnnnnnnnnnnnnnnnnnnnnnnnnnnnnnnnnnnnnnnnnnnnnnnnnnnnnnnnnnnnnnnnnnnnnnnnnnnnnnnnnnnnnnnnnnnnnnnnnnnnnnnnnnnnnnnnnnnnnnnnnnnnnnnnnnnnnnnnnnnnnnnnnnnnnnnnnnnnnnnnnnnnnnnnnnnnnnnnnnnnnnnnnnnnnnnnnnnnnnnnnnnnnnnnnnnnnnnnnnnnnnnnnnnnnnnnnnnnnnnnnnnnnnnnnnnnnnnnnnnnnnnnnnnnnnnnnnnnnnnnnnnnnnnnnnnnnnnnnnnnnnnnnnnnnnnnnnnnnnnnnnnnnnnnnnnnnnnnnnnnnnnnnnnnnnnnnnnnnnnnnnnnnnnnnnnnnnnnnnnnnnnnnnnnnnnnnnnnnnnnnnnnnnnnnnnnnnnnnnnnnnnnnnnnnnnnnnnnnnnnnnnnnnnnnnnnnnnnnnnnnnnnnnnnnnnnnnnnnnnnnnnnnnnnnnnnnnnnnnnnnnnnnnnnnnnnnnnnnnnnnnnnnnnnnnnnnnnnnnnnnnnnnnnnnnnnnnnnnnnnnnnnnnnnnnnnnnnnnnnnnnnnnnnnnnnnnnnnnnnnnnnnnnnnnnnnnnnnnnnnnnnnnnnnnnnnnnnnnnnnnnnnnnnnnnnnnnnnnnnnnnnnnnnnnnnnnnnnnnnnnnnnnnnnnnnnnnnnnnnnnnnnnnnnnnnnnnnnnnnnnnnnnnnnnnnnnnnnnnnnnnnnnnnnnnnnnnnnnnnnnnnnnnnnnnnnnnnnnnnnnnnnnnnnnnnnnnnnnnnnnnnnnnnnnnnnnnnnnnnnnnnnnnnnnnnnnnnnnnnnnnnnnnnnnnnnnnnnnnnnnnnnnnnnnnnnnnnnnnnnnnnnnnnnnnnnnnnnnnnnnnnnnnnnnnnnnnnnnnnnnnnnnnnnnnnnnnnnnnnnnnnnnnnnnnnnnnnnnnnnnnnnnnnnnnnnnnnnnnnnnnnnnnnnnnnnnnnnnnnnnnnnnnnnnnnnnnnnnnnnnnnnnnnnnnnnnnnnnnnnnnnnnnnnnnnnnnnnnnnnnnnnnnnnnnnnnnnnnnnnnnnnnnnnnnnnnnnnnnnnnnnnnnnnnnnnnnnnnnnnnnnnnnnnnnnnnnnnnnnnnnnnnnnnnnnnnnnnnnnnnnnnnnnnnnnnnnnnnnnnnnnnnnnnnnnnnnnnnnnnnnnnnnnnnnnnnnnnnnnnnnnnnnnnnnnnnnnnnnnnnnnnnnnnnnnnnnnnnnnnnnnnnnnnnnnnnnnnnnnnnnnnnnnnnnnnnnnnnnnnnnnnnnnnnnnnnnnnnnnnnnnnnnnnnnnnnnnnnnnnnnnnnnnnnnnnnnnnnnnnnnnnnnnnnnnnnnnnnnnnnnnnnnnnnnnnnnnnnnnnnnnnnnnnnnnnnnnnnnnnnnnnnnnnnnnnnnnnnnnnnnnnnnnnnnnnnnnnnnnnnnnnnnnnnnnnnnnnnnnnnnnnnnnnnnnnnnnnnnnnnnnnnnnnnnnnnnnnnnnnnnnnnnnnnnnnnnnnnnnnnnnnnnnnnnnnnnnnnnnnnnnnnnnnnnnnnnnnnnnnnnnnnnnnnnnnnnnnnnnnnnnnnnnnnnnnnnnnnnnnnnnnnnnnnnnnnnnnnnnnnnnnnnnnnnnnnnnnnnnnnnnnnnnnnnnnnnnnnnnnnnnnnnnnnnnnnnnnnnnnnnnnnnnnnnnnnnnnnnnnnnnnnnnnnnnnnnnnnnnnnnnnnnnnnnnnnnnnnnnnnnnnnnnnnnnnnnnnnnnnnnnnnnnnnnnnnnnnnnnnnnnnnnnnnnnnnnnnnnnnnnnnnnnnnnnnnnnnnnnnnnnnnnnnnnnnnnnnnnnnnnnnnnnnnnnnnnnnnnnnnnnnnnnnnnnnnnnnnnnnnnnnnnnnnnnnnnnnnnnnnnnnnnnnnnnnnnnnnnnnnnnnnnnnnnnnnnnnnnnnnnnnnnnnnnnnnnnnnnnnnnnnnnnnnnnnnnnnnnnnnnnnnnnnnnnnnnnnnnnnnnnnnnnnnnnnnnnnnnnnnnnnnnnnnnnnnnnnnnnnnnnnnnnnnnnnnnnnnnnnnnnnnnnnnnnnnnnnnnnnnnnnnnnnnnnnnnnnnnnnnnnnnnnnnnnnnnnnnnnnnnnnnnnnnnnnnnnnnnnnnnnnnnnnnnnnnnnnnnnnnnnnnnnnnnnnnnnnnnnnnnnnnnnnnnnnnnnnnnnnnnnnnnnnnnnnnnnnnnnnnnnnnnnnnnnnnnnnnnnnnnnnnnnnnnnnnnnnnnnnnnnnnnnnnnnnnnnnnnnnnnnnnnnnnnnnnnnnnnnnnnnnnnnnnnnnnnnnnnnnnnnnnnnnnnnnnnnnnnnnnnnnnnnnnnnnnnnnnnnnnnnnnnnnnnnnnnnnnnnnnnnnnnnnnnnnnnnnnnnnnnnnnnnnnnnnnnnnnnnnnnnnnnnnnnnnnnnnnnnnnnnnnnnnnnnnnnnnnnnnnnnnnnnnnnnnnnnnnnnnnnnnnnnnnnnnnnnnnnnnnnnnnnnnnnnnnnnnnnnnnnnnnnnnnnnnnnnnnnnnnnnnnnnnnnnnnnnnnnnnnnnnnnnnnnnnnnnnnnnnnnnnnnnnnnnnnnnnnnnnnnnnnnnnnnnnnnnnnnnnnnnnnnnnnnnnnnnnnnnnnnnnnnnnnnnnnnnnnnnnnnnnnnnnnnnnnnnnnnnnnnnnnnnnnnnnnnnnnnnnnnnnnnnnnnnnnnnnnnnnnnnnnnnnnnnnnnnnnnnnnnnnnnnnnnnnnnnnnnnnnnnnnnnnnnnnnnnnnnnnnnnnnnnnnnnnnnnnnnnnnnnnnnnnnnnnnnnnnnnnnnnnnnnnnnnnnnnnnnnnnnnnnnnnnnnnnnnnnnnnnnnnnnnnnnnnnnnnnnnnnnnnnnnnnnnnnnnnnnnnnnnnnnnnnnnnnnnnnnnnnnnnnnnnnnnnnnnnnnnnnnnnnnnnnnnnnnnnnnnnnnnnnnnnnnnnnnnnnnnnnnnnnnnnnnnnnnnnnnnnnnnnnnnnnnnnnnnnnnnnnnnnnnnnnnnnnnnnnnnnnnnnnnnnnnnnnnnnnnnnnnnnnnnnnnnnnnnnnnnnnnnnnnnnnnnnnnnnnnnnnnnnnnnnnnnnnnnnnnnnnnnnnnnnnnnnnnnnnnnnnnnnnnnnnnnnnnnnnnnnnnnnnnnnnnnnnnnnnnnnnnnnnnnnnnnnnnnnnnnnnnnnnnnnnnnnnnnnnnnnnnnnnnnnnnnnnnnnnnnnnnnnnnnnnnnnnnnnnnnnnnnnnnnnnnnnnnnnnnnnnnnnnnnnnnnnnnnnnnnnnnnnnnnnnnnnnnnnnnnnnnnnnnnnnnnnnnnnnnnnnnnnnnnnnnnnnnnnnnnnnnnnnnnnnnnnnnnnnnnnnnnnnnnnnnnnnnnnnnnnnnnnnnnnnnnnnnnnnnnnnnnnnnnnnnnnnnnnnnnnnnnnnnnnnnnnnnnnnnnnnnnnnnnnnnnnnnnnnnnnnnnnnnnnnnnnnnnnnnnnnnnnnnnnnnnnnnnnnnnnnnnnnnnnnnnnnnnnnnnnnnnnnnnnnnnnnnnnnnnnnnnnnnnnnnnnnnnnnnnnnnnnnnnnnnnnnnnnnnnnnnnnnnnnnnnnnnnnnnnnnnnnnnnnnnnnnnnnnnnnnnnnnnnnnnnnnnnnnnnnnnnnnnnnnnnnnnnnnnnnnnnnnnnnnnnnnnnnnnnnnnnnnnnnnnnnnnnnnnnnnnnnnnnnnnnnnnnnnnnnnnnnnnnnnnnnnnnnnnnnnnnnnnnnnnnnnnnnnnnnnnnnnnnnnnnnnnnnnnnnnnnnnnnnnnnnnnnnnnnnnnnnnnnnnnnnnnnnnnnnnnnnnnnnnnnnnnnnnnnnnnnnnnnnnnnnnnnnnnnnnnnnnnnnnnnnnnnnnnnnnnnnnnnnnnnnnnnnnnnnnnnnnnnnnnnnnnnnnnnnnnnnnnnnnnnnnnnnnnnnnnnnnnnnnnnnnnnnnnnnnnnnnnnnnnnnnnnnnnnnnnnnnnnnnnnnnnnnnnnnnnnnnnnnnnnnnnnnnnnnnnnnnnnnnnnnnnnnnnnnnnnnnnnnnnnnnnnnnnnnnnnnnnnnnnnnnnnnnnnnnnnnnnnnnnnnnnnnnnnnnnnnnnnnnnnnnnnnnnnnnnnnnnnnnnnnnnnnnnnnnnnnnnnnnnnnnnnnnnnnnnnnnnnnnnnnnnnnnnnnnnnnnnnnnnnnnnnnnnnnnnnnnnnnnnnnnnnnnnnnnnnnnnnnnnnnnnnnnnnnnnnnnnnnnnnnnnnnnnnnnnnnnnnnnnnnnnnnnnnnnnnnnnnnnnnnnnnnnnnnnnnnnnnnnnnnnnnnnnnnnnnnnnnnnnnnnnnnnnnnnnnnnnnnnnnnnnnnnnnnnnnnnnnnnnnnnnnnnnnnnnnnnnnnnnnnnnnnnnnnnnnnnnnnnnnnnnnnnnnnnnnnnnnnnnnnnnnnnnnnnnnnnnnnnnnnnnnnnnnnnnnnnnnnnnnnnnnnnnnnnnnnnnnnnnnnnnnnnnnnnnnnnnnnnnnnnnnnnnnnnnnnnnnnnnnnnnnnnnnnnnnnnnnnnnnnnnnnnnnnnnnnnnnnnnnnnnnnnnnnnnnnnnnnnnnnnnnnnnnnnnnnnnnnnnnnnnnnnnnnnnnnnnnnnnnnnnnnnnnnnnnnnnnnnnnnnnnnnnnnnnnnnnnnnnnnnnnnnnnnnnnnnnnnnnnnnnnnnnnnnnnnnnnnnnnnnnnnnnnnnnnnnnnnnnnnnnnnnnnnnnnnnnnnnnnnnnnnnnnnnnnnnnnnnnnnnnnnnnnnnnnnnnnnnnnnnnnnnnnnnnnnnnnnnnnnnnnnnnnnnnnnnnnnnnnnnnnnnnnnnnnnnnnnnnnnnnnnnnnnnnnnnnnnnnnnnnnnnnnnnnnnnnnnnnnnnnnnnnnnnnnnnnnnnnnnnnnnnnnnnnnnnnnnnnnnnnnnnnnnnnnnnnnnnnnnnnnnnnnnnnnnnnnnnnnnnnnnnnnnnnnnnnnnnnnnnnnnnnnnnnnnnnnnnnnnnnnnnnnnnnnnnnnnnnnnnnnnnnnnnnnnnnnnnnnnnnnnnnnnnnnnnnnnnnnnnnnnnnnnnnnnnnnnnnnnnnnnnnnnnnnnnnnnnnnnnnnnnnnnnnnnnnnnnnnnnnnnnnnnnnnnnnnnnnnnnnnnnnnnnnnnnnnnnnnnnnnnnnnnnnnnnnnnnnnnnnnnnnnnnnnnnnnnnnnnnnnnnnnnnnnnnnnnnnnnnnnnnnnnnnnnnnnnnnnnnnnnnnnnnnnnnnnnnnnnnnnnnnnnnnnnnnnnnnnnnnnnnnnnnnnnnnnnnnnnnnnnnnnnnnnnnnnnnnnnnnnnnnnnnnnnnnnnnnnnnnnnnnnnnnnnnnnnnnnnnnnnnnnnnnnnnnnnnnnnnnnnnnnnnnnnnnnnnnnnnnnnnnnnnnnnnnnnnnnnnnnnnnnnnnnnnnnnnnnnnnnnnnnnnnnnnnnnnnnnnnnnnnnnnnnnnnnnnnnnnnnnnnnnnnnnnnnnnnnnnnnnnnnnnnnnnnnnnnnnnnnnnnnnnnnnnnnnnnnnnnnnnnnnnnnnnnnnnnnnnnnnnnnnnnnnnnnnnnnnnnnnnnnnnnnnnnnnnnnnnnnnnnnnnnnnnnnnnnnnnnnnnnnnnnnnnnnnnnnnnnnnnnnnnnnnnnnnnnnnnnnnnnnnnnnnnnnnnnnnnnnnnnnnnnnnnnnnnnnnnnnnnnnnnnnnnnnnnnnnnnnnnnnnnnnnnnnnnnnnnnnnnnnnnnnnnnnnnnnnnnnnnnnnnnnnnnnnnnnnnnnnnnnnnnnnnnnnnnnnnnnnnnnnnnnnnnnnnnnnnnnnnnnnnnnnnnnnnnnnnnnnnnnnnnnnnnnnnnnnnnnnnnnnnnnnnnnnnnnnnnnnnnnnnnnnnnnnnnnnnnnnnnnnnnnnnnnnnnnnnnnnnnnnnnnnnnnnnnnnnnnnnnnnnnnnnnnnnnnnnnnnnnnnnnnnnnnnnnnnnnnnnnnnnnnnnnnnnnnnnnnnnnnnnnnnnnnnnnnnnnnnnnnnnnnnnnnnnnnnnnnnnnnnnnnnnnnnnnnnnnnnnnnnnnnnnnnnnnnnnnnnnnnnnnnnnnnnnnnnnnnnnnnnnnnnnnnnnnnnnnnnnnnnnnnnnnnnnnnnnnnnnnnnnnnnnnnnnnnnnnnnnnnnnnnnnnnnnnnnnnnnnnnnnnnnnnnnnnnnnnnnnnnnnnnnnnnnnnnnnnnnnnnnnnnnnnnnnnnnnnnnnnnnnnnnnnnnnnnnnnnnnnnnnnnnnnnnnnnnnnnnnnnnnnnnnnnnnnnnnnnnnnnnnnnnnnnnnnnnnnnnnnnnnnnnnnnnnnnnnnnnnnnnnnnnnnnnnnnnnnnnnnnnnnnnnnnnnnnnnnnnnnnnnnnnnnnnnnnnnnnnnnnnnnnnnnnnnnnnnnnnnnnnnnnnnnnnnnnnnnnnnnnnnnnnnnnnnnnnnnnnnnnnnnnnnnnnnnnnnnnnnnnnnnnnnnnnnnnnnnnnnnnnnnnnnnnnnnnnnnnnnnnnnnnnnnnnnnnnnnnnnnnnnnnnnnnnnnnnnnnnnnnnnnnnnnnnnnnnnnnnnnnnnnnnnnnnnnnnnnnnnnnnnnnnnnnnnnnnnnnnnnnnnnnnnnnnnnnnnnnnnnnnnnnnnnnnnnnnnnnnnnnnnnnnnnnnnnnnnnnnnnnnnnnnnnnnnnnnnnnnnnnnnnnnnnnnnnnnnnnnnnnnnnnnnnnnnnnnnnnnnnnnnnnnnnnnnnnnnnnnnnnnnnnnnnnnnnnnnnnnnnnnnnnnnnnnnnnnnnnnnnnnnnnnnnnnnnnnnnnnnnnnnnnnnnnnnnnnnnnnnnnnnnnnnnnnnnnnnnnnnnnnnnnnnnnnnnnnnnnnnnnnnnnnnnnnnnnnnnnnnnnnnnnnnnnnnnnnnnnnnnnnnnnnnnnnnnnnnnnnnnnnnnnnnnnnnnnnnnnnnnnnnnnnnnnnnnnnnnnnnnnnnnnnnnnnnnnnnnnnnnnnnnnnnnnnnnnnnnnnnnnnnnnnnnnnnnnnnnnnnnnnnnnnnnnnnnnnnnnnnnnnnnnnnnnnnnnnnnnnnnnnnnnnnnnnnnnnnnnnnnnnnnnnnnnnnnnnnnnnnnnnnnnnnnnnnnnnnnnnnnnnnnnnnnnnnnnnnnnnnnnnnnnnnnnnnnnnnnnnnnnnnnnnnnnnnnnnnnnnnnnnnnnnnnnnnnnnnnnnnnnnnnnnnnnnnnnnnnnnnnnnnnnnnnnnnnnnnnnnnnnnnnnnnnnnnnnnnnnnnnnnnnnnnnnnnnnnnnnnnnnnnnnnnnnnnnnnnnnnnnnnnnnnnnnnnnnnnnnnnnnnnnnnnnnnnnnnnnnnnnnnnnnnnnnnnnnnnnnnnnnnnnnnnnnnnnnnnnnnnnnnnnnnnnnnnnnnnnnnnnnnnnnnnnnnnnnnnnnnnnnnnnnnnnnnnnnnnnnnnnnnnnnnnnnnnnnnnnnnnnnnnnnnnnnnnnnnnnnnnnnnnnnnnnnnnnnnnnnnnnnnnnnnnnnnnnnnnnnnnnnnnnnnnnnnnnnnnnnnnnnnnnnnnnnnnnnnnnnnnnnnnnnnnnnnnnnnnnnnnnnnnnnnnnnnnnnnnnnnnnnnnnnnnnnnnnnnnnnnnnnnnnnnnnnnnnnnnnnnnnnnnnnnnnnnnnnnnnnnnnnnnnnnnnnnnnnnnnnnnnnnnnnnnnnnnnnnnnnnnnnnnnnnnnnnnnnnnnnnnnnnnnnnnnnnnnnnnnnnnnnnnnnnnnnnnnnnnnnnnnnnnnnnnnnnnnnnnnnnnnnnnnnnnnnnnnnnnnnnnnnnnnnnnnnnnnnnnnnnnnnnnnnnnnnnnnnnnnnnnnnnnnnnnnnnnnnnnnnnnnnnnnnnnnnnnnnnnnnnnnnnnnnnnnnnnnnnnnnnnnnnnnnnnnnnnnnnnnnnnnnnnnnnnnnnnnnnnnnnnnnnnnnnnnnnnnnnnnnnnnnnnnnnnnnnnnnnnnnnnnnnnnnnnnnnnnnnnnnnnnnnnnnnnnnnnnnnnnnnnnnnnnnnnnnnnnnnnnnnnnnnnnnnnnnnnnnnnnnnnnnnnnnnnnnnnnnnnnnnnnnnnnnnnnnnnnnnnnnnnnnnnnnnnnnnnnnnnnnnnnnnnnnnnnnnnnnnnnnnnnnnnnnnnnnnnnnnnnnnnnnnnnnnnnnnnnnnnnnnnnnnnnnnnnnnnnnnnnnnnnnnnnnnnnnnnnnnnnnnnnnnnnnnnnnnnnnnnnnnnnnnnnnnnnnnnnnnnnnnnnnnnnnnnnnnnnnnnnnnnnnnnnnnnnnnnnnnnnnnnnnnnnnnnnnnnnnnnnnnnnnnnnnnnnnnnnnnnnnnnnnnnnnnnnnnnnnnnnnnnnnnnnnnnnnnnnnnnnnnnnnnnnnnnnnnnnnnnnnnnnnnnnnnnnnnnnnnnnnnnnnnnnnnnnnnnnnnnnnnnnnnnnnnnnnnnnnnnnnnnnnnnnnnnnnnnnnnnnnnnnnnnnnnnnnnnnnnnnnnnnnnnnnnnnnnnnnnnnnnnnnnnnnnnnnnnnnnnnnnnnnnnnnnnnnnnnnnnnnnnnnnnnnnnnnnnnnnnnnnnnnnnnnnnnnnnnnnnnnnnnnnnnnnnnnnnnnnnnnnnnnnnnnnnnnnnnnnnnnnnnnnnnnnnnnnnnnnnnnnnnnnnnnnnnnnnnnnnnnnnnnnnnnnnnnnnnnnnnnnnnnnnnnnnnnnnnnnnnnnnnnnnnnnnnnnnnnnnnnnnnnnnnnnnnnnnnnnnnnnnnnnnnnnnnnnnnnnnnnnnnnnnnnnnnnnnnnnnnnnnnnnnnnnnnnnnnnnnnnnnnnnnnnnnnnnnnnnnnnnnnnnnnnnnnnnnnnnnnnnnnnnnnnnnnnnnnnnnnnnnnnnnnnnnnnnnnnnnnnnnnnnnnnnnnnnnnnnnnnnnnnnnnnnnnnnnnnnnnnnnnnnnnnnnnnnnnnnnnnnnnnnnnnnnnnnnnnnnnnnnnnnnnnnnnnnnnnnnnnnnnnnnnnnnnnnnnnnnnnnnnnnnnnnnnnnnnnnnnnnnnnnnnnnnnnnnnnnnnnnnnnnnnnnnnnnnnnnnnnnnnnnnnnnnnnnnnnnnnnnnnnnnnnnnnnnnnnnnnnnnnnnnnnnnnnnnnnnnnnnnnnnnnnnnnnnnnnnnnnnnnnnnnnnnnnnnnnnnnnnnnnnnnnnnnnnnnnnnnnnnnnnnnnnnnnnnnnnnnnnnnnnnnnnnnnnnnnnnnnnnnnnnnnnnnnnnnnnnnnnnnnnnnnnnnnnnnnnnnnnnnnnnnnnnnnnnnnnnnnnnnnnnnnnnnnnnnnnnnnnnnnnnnnnnnnnnnnnnnnnnnnnnnnnnnnnnnnnnnnnnnnnnnnnnnnnnnnnnnnnnnnnnnnnnnnnnnnnnnnnnnnnnnnnnnnnnnnnnnnnnnnnnnnnnnnnnnnnnnnnnnnnnnnnnnnnnnnnnnnnnnnnnnnnnnnnnnnnnnnnnnnnnnnnnnnnnnnnnnnnnnnnnnnnnnnnnnnnnnnnnnnnnnnnnnnnnnnnnnnnnnnnnnnnnnnnnnnnnnnnnnnnnnnnnnnnnnnnnnnnnnnnnnnnnnnnnnnnnnnnnnnnnnnnnnnnnnnnnnnnnnnnnnnnnnnnnnnnnnnnnnnnnnnnnnnnnnnnnnnnnnnnnnnnnnnnnnnnnnnnnnnnnnnnnnnnnnnnnnnnnnnnnnnnnnnnnnnnnnnnnnnnnnnnnnnnnnnnnnnnnnnnnnnnnnnnnnnnnnnnnnnnnnnnnnnnnnnnnnnnnnnnnnnnnnnnnnnnnnnnnnnnnnnnnnnnnnnnnnnnnnnnnnnnnnnnnnnnnnnnnnnnnnnnnnnnnnnnnnnnnnnnnnnnnnnnnnnnnnnnnnnnnnnnnnnnnnnnnnnnnnnnnnnnnnnnnnnnnnnnnnnnnnnnnnnnnnnnnnnnnnnnnnnnnnnnnnnnnnnnnnnnnnnnnnnnnnnnnnnnnnnnnnnnnnnnnnnnnnnnnnnnnnnnnnnnnnnnnnnnnnnnnnnnnnnnnnnnnnnnnnnnnnnnnnnnnnnnnnnnnnnnnnnnnnnnnnnnnnnnnnnnnnnnnnnnnnnnnnnnnnnnnnnnnnnnnnnnnnnnnnnnnnnnnnnnnnnnnnnnnnnnnnnnnnnnnnnnnnnnnnnnnnnnnnnnnnnnnnnnnnnnnnnnnnnnnnnnnnnnnnnnnnnnnnnnnnnnnnnnnnnnnnnnnnnnnnnnnnnnnnnnnnnnnnnnnnnnnnnnnnnnnnnnnnnnnnnnnnnnnnnnnnnnnnnnnnnnnnnnnnnnnnnnnnnnnnnnnnnnnnnnnnnnnnnnnnnnnnnnnnnnnnnnnnnnnnnnnnnnnnnnnnnnnnnnnnnnnnnnnnnnnnnnnnnnnnnnnnnnnnnnnnnnnnnnnnnnnnnnnnnnnnnnnnnnnnnnnnnnnnnnnnnnnnnnnnnnnnnnnnnnnnnnnnnnnnnnnnnnnnnnnnnnnnnnnnnnnnnnnnnnnnnnnnnnnnnnnnnnnnnnnnnnnnnnnnnnnnnnnnnnnnnnnnnnnnnnnnnnnnnnnnnnnnnnnnnnnnnnnnnnnnnnnnnnnnnnnnnnnnnnnnnnnnnnnnnnnnnnnnnnnnnnnnnnnnnnnnnnnnnnnnnnnnnnnnnnnnnnnnnnnnnnnnnnnnnnnnnnnnnnnnnnnnnnnnnnnnnnnnnnnnnnnnnnnnnnnnnnnnnnnnnnnnnnnnnnnnnnnnnnnnnnnnnnnnnnnnnnnnnnnnnnnnnnnnnnnnnnnnnnnnnnnnnnnnnnnnnnnnnnnnnnnnnnnnnnnnnnnnnnnnnnnnnnnnnnnnnnnnnnnnnnnnnnnnnnnnnnnnnnnnnnnnnnnnnnnnnnnnnnnnnnnnnnnnnnnnnnnnnnnnnnnnnnnnnnnnnnnnnnnnnnnnnnnnnnnnnnnnnnnnnnnnnnnnnnnnnnnnnnnnnnnnnnnnnnnnnnnnnnnnnnnnnnnnnnnnnnnnnnnnnnnnnnnnnnnnnnnnnnnnnnnnnnnnnnnnnnnnnnnnnnnnnnnnnnnnnnnnnnnnnnnnnnnnnnnnnnnnnnnnnnnnnnnnnnnnnnnnnnnnnnnnnnnnnnnnnnnnnnnnnnnnnnnnnnnnnnnnnnnnnnnnnnnnnnnnnnnnnnnnnnnnnnnnnnnnnnnnnnnnnnnnnnnnnnnnnnnnnnnnnnnnnnnnnnnnnnnnnnnnnnnnnnnnnnnnnnnnnnnnnnnnnnnnnnnnnnnnnnnnnnnnnnnnnnnnnnnnnnnnnnnnnnnnnnnnnnnnnnnnnnnnnnnnnnnnnnnnnnnnnnnnnnnnnnnnnnnnnnnnnnnnnnnnnnnnnnnnnnnnnnnnnnnnnnnnnnnnnnnnnnnnnnnnnnnnnnnnnnnnnnnnnnnnnnnnnnnnnnnnnnnnnnnnnnnnnnnnnnnnnnnnnnnnnnnnnnnnnnnnnnnnnnnnnnnnnnnnnnnnnnnnnnnnnnnnnnnnnnnnnnnnnnnnnnnnnnnnnnnnnnnnnnnnnnnnnnnnnnnnnnnnnnnnnnnnnnnnnnnnnnnnnnnnnnnnnnnnnnnnnnnnnnnnnnnnnnnnnnnnnnnnnnnnnnnnnnnnnnnnnnnnnnnnnnnnnnnnnnnnnnnnnnnnnnnnnnnnnnnnnnnnnnnnnnnnnnnnnnnnnnnnnnnnnnnnnnnnnnnnnnnnnnnnnnnnnnnnnnnnnnnnnnnnnnnnnnnnnnnnnnnnnnnnnnnnnnnnnnnnnnnnnnnnnnnnnnnnnnnnnnnnnnnnnnnnnnnnnnnnnnnnnnnnnnnnnnnnnnnnnnnnnnnnnnnnnnnnnnnnnnnnnnnnnnnnnnnnnnnnnnnnnnnnnnnnnnnnnnnnnnnnnnnnnnnnnnnnnnnnnnnnnnnnnnnnnnnnnnnnnnnnnnnnnnnnnnnnnnnnnnnnnnnnnnnnnnnnnnnnnnnnnnnnnnnnnnnnnnnnnnnnnnnnnnnnnnnnnnnnnnnnnnnnnnnnnnnnnnnnnnnnnnnnnnnnnnnnnnnnnnnnnnnnnnnnnnnnnnnnnnnnnnnnnnnnnnnnnnnnnnnnnnnnnnnnnnnnnnnnnnnnnnnnnnnnnnnnnnnnnnnnnnnnnnnnnnnnnnnnnnnnnnnnnnnnnnnnnnnnnnnnnnnnnnnnnnnnnnnnnnnnnnnnnnnnnnnnnnnnnnnnnnnnnnnnnnnnnnnnnnnnnnnnnnnnnnnnnnnnnnnnnnnnnnnnnnnnnnnnnnnnnnnnnnnnnnnnnnnnnnnnnnnnnnnnnnnnnnnnnnnnnnnnnnnnnnnnnnnnnnnnnnnnnnnnnnnnnnnnnnnnnnnnnnnnnnnnnnnnnnnnnnnnnnnnnnnnnnnnnnnnnnnnnnnnnnnnnnnnnnnnnnnnnnnnnnnnnnnnnnnnnnnnnnnnnnnnnnnnnnnnnnnnnnnnnnnnnnnnnnnnnnnnnnnnnnnnnnnnnnnnnnnnnnnnnnnnnnnnnnnnnnnnnnnnnnnnnnnnnnnnnnnnnnnnnnnnnnnnnnnnnnnnnnnnnnnnnnnnnnnnnnnnnnnnnnnnnnnnnnnnnnnnnnnnnnnnnnnnnnnnnnnnnnnnnnnnnnnnnnnnnnnnnnnnnnnnnnnnnnnnnnnnnnnnnnnnnnnnnnnnnnnnnnnnnnnnnnnnnnnnnnnnnnnnnnnnnnnnnnnnnnnnnnnnnnnnnnnnnnnnnnnnnnnnnnnnnnnnnnnnnnnnnnnnnnnnnnnnnnnnnnnnnnnnnnnnnnnnnnnnnnnnnnnnnnnnnnnnnnnnnnnnnnnnnnnnnnnnnnnnnnnnnnnnnnnnnnnnnnnnnnnnnnnnnnnnnnnnnnnnnnnnnnnnnnnnnnnnnnnnnnnnnnnnnnnnnnnnnnnnnnnnnnnnnnnnnnnnnnnnnnnnnnnnnnnnnnnnnnnnnnnnnnnnnnnnnnnnnnnnnnnnnnnnnnnnnnnnnnnnnnnnnnnnnnnnnnnnnnnnnnnnnnnnnnnnnnnnnnnnnnnnnnnnnnnnnnnnnnnnnnnnnnnnnnnnnnnnnnnnnnnnnnnnnnnnnnnnnnnnnnnnnnnnnnnnnnnnnnnnnnnnnnnnnnnnnnnnnnnnnnnnnnnnnnnnnnnnnnnnnnnnnnnnnnnnnnnnnnnnnnnnnnnnnnnnnnnnnnnnnnnnnnnnnnnnnnnnnnnnnnnnnnnnnnnnnnnnnnnnnnnnnnnnnnnnnnnnnnnnnnnnnnnnnnnnnnnnnnnnnnnnnnnnnnnnnnnnnnnnnnnnnnnnnnnnnnnnnnnnnnnnnnnnnnnnnnnnnnnnnnnnnnnnnnnnnnnnnnnnnnnnnnnnnnnnnnnnnnnnnnnnnnnnnnnnnnnnnnnnnnnnnnnnnnnnnnnnnnnnnnnnnnnnnnnnnnnnnnnnnnnnnnnnnnnnnnnnnnnnnnnnnnnnnnnnnnnnnnnnnnnnnnnnnnnnnnnnnnnnnnnnnnnnnnnnnnnnnnnnnnnnnnnnnnnnnnnnnnnnnnnnnnnnnnnnnnnnnnnnnnnnnnnnnnnnnnnnnnnnnnnnnnnnnnnnnnnnnnnnnnnnnnnnnnnnnnnnnnnnnnnnnnnnnnnnnnnnnnnnnnnnnnnnnnnnnnnnnnnnnnnnnnnnnnnnnnnnnnnnnnnnnnnnnnnnnnnnnnnnnnnnnnnnnnnnnnnnnnnnnnnnnnnnnnnnnnnnnnnnnnnnnnnnnnnnnnnnnnnnnnnnnnnnnnnnnnnnnnnnnnnnnnnnnnnnnnnnnnnnnnnnnnnnnnnnnnnnnnnnnnnnnnnnnnnnnnnnnnnnnnnnnnnnnnnnnnnnnnnnnnnnnnnnnnnnnnnnnnnnnnnnnnnnnnnnnnnnnnnnnnnnnnnnnnnnnnnnnnnnnnnnnnnnnnnnnnnnnnnnnnnnnnnnnnnnnnnnnnnnnnnnnnnnnnnnnnnnnnnnnnnnnnnnnnnnnnnnnnnnnnnnnnnnnnnnnnnnnnnnnnnnnnnnnnnnnnnnnnnnnnnnnnnnnnnnnnnnnnnnnnnnnnnnnnnnnnnnnnnnnnnnnnnnnnnnnnnnnnnnnnnnnnnnnnnnnnnnnnnnnnnnnnnnnnnnnnnnnnnnnnnnnnnnnnnnnnnnnnnnnnnnnnnnnnnnnnnnnnnnnnnnnnnnnnnnnnnnnnnnnnnnnnnnnnnnnnnnnnnnnnnnnnnnnnnnnnnnnnnnnnnnnnnnnnnnnnnnnnnnnnnnnnnnnnnnnnnnnnnnnnnnnnnnnnnnnnnnnnnnnnnnnnnnnnnnnnnnnnnnnnnnnnnnnnnnnnnnnnnnnnnnnnnnnnnnnnnnnnnnnnnnnnnnnnnnnnnnnnnnnnnnnnnnnnnnnnnnnnnnnnnnnnnnnnnnnnnnnnnnnnnnnnnnnnnnnnnnnnnnnnnnnnnnnnnnnnnnnnnnnnnnnnnnnnnnnnnnnnnnnnnnnnnnnnnnnnnnnnnnnnnnnnnnnnnnnnnnnnnnnnnnnnnnnnnnnnnnnnnnnnnnnnnnnnnnnnnnnnnnnnnnnnnnnnnnnnnnnnnnnnnnnnnnnnnnnnnnnnnnnnnnnnnnnnnnnnnnnnnnnnnnnnnnnnnnnnnnnnnnnnnnnnnnnnnnnnnnnnnnnnnnnnnnnnnnnnnnnnnnnnnnnnnnnnnnnnnnnnnnnnnnnnnnnnnnnnnnnnnnnnnnnnnnnnnnnnnnnnnnnnnnnnnnnnnnnnnnnnnnnnnnnnnnnnnnnnnnnnnnnnnnnnnnnnnnnnnnnnnnnnnnnnnnnnnnnnnnnnnnnnnnnnnnnnnnnnnnnnnnnnnnnnnnnnnnnnnnnnnnnnnnnnnnnnnnnnnnnnnnnnnnnnnnnnnnnnnnnnnnnnnnnnnnnnnnnnnnnnnnnnnnnnnnnnnnnnnnnnnnnnnnnnnnnnnnnnnnnnnnnnnnnnnnnnnnnnnnnnnnnnnnnnnnnnnnnnnnnnnnnnnnnnnnnnnnnnnnnnnnnnnnnnnnnnnnnnnnnnnnnnnnnnnnnnnnnnnnnnnnnnnnnnnnnnnnnnnnnnnnnnnnnnnnnnnnnnnnnnnnnnnnnnnnnnnnnnnnnnnnnnnnnnnnnnnnnnnnnnnnnnnnnnnnnnnnnnnnnnnnnnnnnnnnnnnnnnnnnnnnnnnnnnnnnnnnnnnnnnnnnnnnnnnnnnnnnnnnnnnnnnnnnnnnnnnnnnnnnnnnnnnnnnnnnnnnnnnnnnnnnnnnnnnnnnnnnnnnnnnnnnnnnnnnnnnnnnnnnnnnnnnnnnnnnnnnnnnnnnnnnnnnnnnnnnnnnnnnnnnnnnnnnnnnnnnnnnnnnnnnnnnnnnnnnnnnnnnnnnnnnnnnnnnnnnnnnnnnnnnnnnnnnnnnnnnnnnnnnnnnnnnnnnnnnnnnnnnnnnnnnnnnnnnnnnnnnnnnnnnnnnnnnnnnnnnnnnnnnnnnnnnnnnnnnnnnnnnnnnnnnnnnnnnnnnnnnnnnnnnnnnnnnnnnnnnnnnnnnnnnnnnnnnnnnnnnnnnnnnnnnnnnnnnnnnnnnnnnnnnnnnnnnnnnnnnnnnnnnnnnnnnnnnnnnnnnnnnnnnnnnnnnnnnnnnnnnnnnnnnnnnnnnnnnnnnnnnnnnnnnnnnnnnnnnnnnnnnnnnnnnnnnnnnnnnnnnnnnnnnnnnnnnnnnnnnnnnnnnnnnnnnnnnnnnnnnnnnnnnnnnnnnnnnnnnnnnnnnnnnnnnnnnnnnnnnnnnnnnnnnnnnnnnnnnnnnnnnnnnnnnnnnnnnnnnnnnnnnnnnnnnnnnnnnnnnnnnnnnnnnnnnnnnnnnnnnnnnnnnnnnnnnnnnnnnnnnnnnnnnnnnnnnnnnnnnnnnnnnnnnnnnnnnnnnnnnnnnnnnnnnnnnnnnnnnnnnnnnnnnnnnnnnnnnnnnnnnnnnnnnnnnnnnnnnnnnnnnnnnnnnnnnnnnnnnnnnnnnnnnnnnnnnnnnnnnnnnnnnnnnnnnnnnnnnnnnnnnnnnnnnnnnnnnnnnnnnnnnnnnnnnnnnnnnnnnnnnnnnnnnnnnnnnnnnnnnnnnnnnnnnnnnnnnnnnnnnnnnnnnnnnnnnnnnnnnnnnnnnnnnnnnnnnnnnnnnnnnnnnnnnnnnnnnnnnnnnnnnnnnnnnnnnnnnnnnnnnnnnnnnnnnnnnnnnnnnnnnnnnnnnnnnnnnnnnnnnnnnnnnnnnnnnnnnnnnnnnnnnnnnnnnnnnnnnnnnnnnnnnnnnnnnnnnnnnnnnnnnnnnnnnnnnnnnnnnnnnnnnnnnnnnnnnnnnnnnnnnnnnnnnnnnnnnnnnnnnnnnnnnnnnnnnnnnnnnnnnnnnnnnnnnnnnnnnnnnnnnnnnnnnnnnnnnnnnnnnnnnnnnnnnnnnnnnnnnnnnnnnnnnnnnnnnnnnnnnnnnnnnnnnnnnnnnnnnnnnnnnnnnnnnnnnnnnnnnnnnnnnnnnnnnnnnnnnnnnnnnnnnnnnnnnnnnnnnnnnnnnnnnnnnnnnnnnnnnnnnnnnnnnnnnnnnnnnnnnnnnnnnnnnnnnnnnnnnnnnnnnnnnnnnnnnnnnnnnnnnnnnnnnnnnnnnnnnnnnnnnnnnnnnnnnnnnnnnnnnnnnnnnnnnnnnnnnnnnnnnnnnnnnnnnnnnnnnnnnnnnnnnnnnnnnnnnnnnnnnnnnnnnnnnnnnnnnnnnnnnnnnnnnnnnnnnnnnnnnnnnnnnnnnnnnnnnnnnnnnnnnnnnnnnnnnnnnnnnnnnnnnnnnnnnnnnnnnnnnnnnnnnnnnnnnnnnnnnnnnnnnnnnnnnnnnnnnnnnnnnnnnnnnnnnnnnnnnnnnnnnnnnnnnnnnnnnnnnnnnnnnnnnnnnnnnnnnnnnnnnnnnnnnnnnnnnnnnnnnnnnnnnnnnnnnnnnnnnnnnnnnnnnnnnnnnnnnnnnnnnnnnnnnnnnnnnnnnnnnnnnnnnnnnnnnnnnnnnnnnnnnnnnnnnnnnnnnnnnnnnnnnnnnnnnnnnnnnnnnnnnnnnnnnnnnnnnnnnnnnnnnnnnnnnnnnnnnnnnnnnnnnnnnnnnnnnnnnnnnnnnnnnnnnnnnnnnnnnnnnnnnnnnnnnnnnnnnnnnnnnnnnnnnnnnnnnnnnnnnnnnnnnnnnnnnnnnnnnnnnnnnnnnnnnnnnnnnnnnnnnnnnnnnnnnnnnnnnnnnnnnnnnnnnnnnnnnnnnnnnnnnnnnnnnnnnnnnnnnnnnnnnnnnnnnnnnnnnnnnnnnnnnnnnnnnnnnnnnnnnnnnnnnnnnnnnnnnnnnnnnnnnnnnnnnnnnnnnnnnnnnnnnnnnnnnnnnnnnnnnnnnnnnnnnnnnnnnnnnnnnnnnnnnnnnnnnnnnnnnnnnnnnnnnnnnnnnnnnnnnnnnnnnnnnnnnnnnnnnnnnnnnnnnnnnnnnnnnnnnnnnnnnnnnnnnnnnnnnnnnnnnnnnnnnnnnnnnnnnnnnnnnnnnnnnnnnnnnnnnnnnnnnnnnnnnnnnnnnnnnnnnnnnnnnnnnnnnnnnnnnnnnnnnnnnnnnnnnnnnnnnnnnnnnnnnnnnnnnnnnnnnnnnnnnnnnnnnnnnnnnnnnnnnnnnnnnnnnnnnnnnnnnnnnnnnnnnnnnnnnnnnnnnnnnnnnnnnnnnnnnnnnnnnnnnnnnnnnnnnnnnnnnnnnnnnnnnnnnnnnnnnnnnnnnnnnnnnnnnnnnnnnnnnnnnnnnnnnnnnnnnnnnnnnnnnnnnnnnnnnnnnnnnnnnnnnnnnnnnnnnnnnnnnnnnnnnnnnnnnnnnnnnnnnnnnnnnnnnnnnnnnnnnnnnnnnnnnnnnnnnnnnnnnnnnnnnnnnnnnnnnnnnnnnnnnnnnnnnnnnnnnnnnnnnnnnnnnnnnnnnnnnnnnnnnnnnnnnnnnnnnnnnnnnnnnnnnnnnnnnnnnnnnnnnnnnnnnnnnnnnnnnnnnnnnnnnnnnnnnnnnnnnnnnnnnnnnnnnnnnnnnnnnnnnnnnnnnnnnnnnnnnnnnnnnnnnnnnnnnnnnnnnnnnnnnnnnnnnnnnnnnnnnnnnnnnnnnnnnnnnnnnnnnnnnnnnnnnnnnnnnnnnnnnnnnnnnnnnnnnnnnnnnnnnnnnnnnnnnnnnnnnnnnnnnnnnnnnnnnnnnnnnnnnnnnnnnnnnnnnnnnnnnnnnnnnnnnnnnnnnnnnnnnnnnnnnnnnnnnnnnnnnnnnnnnnnnnnnnnnnnnnnnnnnnnnnnnnnnnnnnnnnnnnnnnnnnnnnnnnnnnnnnnnnnnnnnnnnnnnnnnnnnnnnnnnnnnnnnnnnnnnnnnnnnnnnnnnnnnnnnnnnnnnnnnnnnnnnnnnnnnnnnnnnnnnnnnnnnnnnnnnnnnnnnnnnnnnnnnnnnnnnnnnnnnnnnnnnnnnnnnnnnnnnnnnnnnnnnnnnnnnnnnnnnnnnnnnnnnnnnnnnnnnnnnnnnnnnnnnnnnnnnnnnnnnnnnnnnnnnnnnnnnnnnnnnnnnnnnnnnnnnnnnnnnnnnnnnnnnnnnnnnnnnnnnnnnnnnnnnnnnnnnnnnnnnnnnnnnnnnnnnnnnnnnnnnnnnnnnnnnnnnnnnnnnnnnnnnnnnnnnnnnnnnnnnnnnnnnnnnnnnnnnnnnnnnnnnnnnnnnnnnnnnnnnnnnnnnnnnnnnnnnnnnnnnnnnnnnnnnnnnnnnnnnnnnnnnnnnnnnnnnnnnnnnnnnnnnnnnnnnnnnnnnnnnnnnnnnnnnnnnnnnnnnnnnnnnnnnnnnnnnnnnnnnnnnnnnnnnnnnnnnnnnnnnnnnnnnnnnnnnnnnnnnnnnnnnnnnnnnnnnnnnnnnnnnnnnnnnnnnnnnnnnnnnnnnnnnnnnnnnnnnnnnnnnnnnnnnnnnnnnnnnnnnnnnnnnnnnnnnnnnnnnnnnnnnnnnnnnnnnnnnnnnnnnnnnnnnnnnnnnnnnnnnnnnnnnnnnnnnnnnnnnnnnnnnnnnnnnnnnnnnnnnnnnnnnnnnnnnnnnnnnnnnnnnnnnnnnnnnnnnnnnnnnnnnnnnnnnnnnnnnnnnnnnnnnnnnnnnnnnnnnnnnnnnnnnnnnnnnnnnnnnnnnnnnnnnnnnnnnnnnnnnnnnnnnnnnnnnnnnnnnnnnnnnnnnnnnnnnnnnnnnnnnnnnnnnnnnnnnnnnnnnnnnnnnnnnnnnnnnnnnnnnnnnnnnnnnnnnnnnnnnnnnnnnnnnnnnnnnnnnnnnnnnnnnnnnnnnnnnnnnnnnnnnnnnnnnnnnnnnnnnnnnnnnnnnnnnnnnnnnnnnnnnnnnnnnnnnnnnnnnnnnnnnnnnnnnnnnnnnnnnnnnnnnnnnnnnnnnnnnnnnnnnnnnnnnnnnnnnnnnnnnnnnnnnnnnnnnnnnnnnnnnnnnnnnnnnnnnnnnnnnnnnnnnnnnnnnnnnnnnnnnnnnnnnnnnnnnnnnnnnnnnnnnnnnnnnnnnnnnnnnnnnnnnnnnnnnnnnnnnnnnnnnnnnnnnnnnnnnnnnnnnnnnnnnnnnnnnnnnnnnnnnnnnnnnnnnnnnnnnnnnnnnnnnnnnnnnnnnnnnnnnnnnnnnnnnnnnnnnnnnnnnnnnnnnnnnnnnnnnnnnnnnnnnnnnnnnnnnnnnnnnnnnnnnnnnnnnnnnnnnnnnnnnnnnnnnnnnnnnnnnnnnnnnnnnnnnnnnnnnnnnnnnnnnnnnnnnnnnnnnnnnnnnnnnnnnnnnnnnnnnnnnnnnnnnnnnnnnnnnnnnnnnnnnnnnnnnnnnnnnnnnnnnnnnnnnnnnnnnnnnnnnnnnnnnnnnnnnnnnnnnnnnnnnnnnnnnnnnnnnnnnnnnnnnnnnnnnnnnnnnnnnnnnnnnnnnnnnnnnnnnnnnnnnnnnnnnnnnnnnnnnnnnnnnnnnnnnnnnnnnnnnnnnnnnnnnnnnnnnnnnnnnnnnnnnnnnnnnnnnnnnnnnnnnnnnnnnnnnnnnnnnnnnnnnnnnnnnnnnnnnnnnnnnnnnnnnnnnnnnnnnnnnnnnnnnnnnnnnnnnnnnnnnnnnnnnnnnnnnnnnnnnnnnnnnnnnnnnnnnnnnnnnnnnnnnnnnnnnnnnnnnnnnnnnnnnnnnnnnnnnnnnnnnnnnnnnnnnnnnnnnnnnnnnnnnnnnnnnnnnnnnnnnnnnnnnnnnnnnnnnnnnnnnnnnnnnnnnnnnnnnnnnnnnnnnnnnnnnnnnnnnnnnnnnnnnnnnnnnnnnnnnnnnnnnnnnnnnnnnnnnnnnnnnnnnnnnnnnnnnngatctcatctgagtcacatcaaagcccacactcttcttcaacgttcaccttccagacacgctccaaaacagcccctcagaattgtcttgagatgaaacaaaaggtgatgaagctccaggtttggaatgcctgcctcattcctcactcctgaaaagtctacacctgctggttagaactctcataccttagggagcccgggctctcagagtgcatcctctaacaggacctcctggccttttcctccttggaggagagtgcccaagaataagagggaatacatggcctccactctcacttgacttgattgactgattaactgatgtctgaggaggaaacatatgtagggaacagcctgggtcttttgaatccctgttccccagctatgatgcctgtgcaaatggagggagaatcccaaagtattgttgggaggtagacagacactggctaacacaattaagtaaatataaggtgacttgaagggaaatttatcatatgtcatatacaaaattttagttagtgaactttatttaaaaacagtcacaatttgtaaggggagtaaagtataattttaatggggaactatgaaaattatctgcacttgctatgtaaatgattgagttaggggtaacaatctgaaggtcatgagcttgatatctgctacttaatttcataagacatttacttgcaaatggttgtcatttttgctctcaccatatgaaaattttttcttgctaagagcattcctatgaaagaaaaactagaaattttgccaatttcggttattaaaacaataaaactggtttgtttgttattcttaaccaaatgctcctacagatggcacatagtacccatgctttgattgtttttttcccaccttaagtcaattgcctttcattttattcatcaaactgtttttactgtagatagacattgcagttgtcatgtgccctatggatttgtactttattagaaatatgaattctcaggccgagtatattggctcacgcctgtaatcccagcactttgcgaggtggaagagagtggatcacctgaggtcaggagttcaagaacagcctgaccaacatggtaaaaccccatctctctactatttacagttcgcattgtaccttgcaatgaatatacattttatccaaaaagcctaaaaaataatgaaattgggggtgggggcatggctggaagtatagataaaacaaaaatgacacatgactagcagctgttaaagctgggtgactggtctgttatactttttttgtattgtgtatgtttttagtgatctgtaataaaacacttgtacaaaatgacaaagtttatctacacttagctcttaaggtcttggttacctttgggaaggggaaagtgtcaggggcatgaacaaatctgattcttagatacacaagtgtatttatttagtaataattcatcaaacattccctaaatgctttgtgcctatattgctgtatgcatgttatttatcaataaaaatgtaaagagtgcatgtttgcataacaatcctaaattaatattttagaataatagcaatgttttgttttgttttcaagtggggcgtgttcactcaggacatcatcaggtgtatgttaatgttccaagttatttatttatgttttaacttttgggtgagcccccctgggtcttttaatttttacttcaacacagtaagtagcatggttttaactttttggaatgcagctttgttttcatcaaggttctccccgaagaatgatgctcacccaggccagggcacacagtgacccgtgcacaggatgcactgagcacacacggcactgggtgaaccaggaacagaaggagaagccagcctgggtctgcaaaatatactttgcaggaaaagcaggtaaaatggaaaggtcacaattcagcagcaaacgttttcacattcattggagaaatcatttctaacaaaagctgctcgttaaagccatggttttctggcttgcctacacattgtaatcacctgcacgactttcaaccatatttttttcagatccagctccaaggattctgatttagttgtgcggttacaacttgggtttaagggattttgaaagttttcctccccgcaggtgattctcttgcgccaggggtaagaagcgctggataggggtgagggatgctttagctgtgagagatagccatgtacgcttcaggatttgccccatcgcatatctggagttcggggtcttagaaagctttcttgccctgttaaaaattaaaggatggcttcaatacatacttagctgcttggctacattgcagaaaaacaaattgcctttccagagatcagttttttgagacagggttttgctctgtcagccaggctggagtgcagttgtgtgatcatggttcattgcagccttgacctcccaggctcaggtgatcctccagctccagccttctgagtagctgggactgaagtcatgcaccaccaggcctggctaatttttcaaatttttttttttttttttttttttttttttttttgtagagatggctttctctatgctgcctgggctggtctcaaactcctggtctcaagtgatcctcccacctcagtctccctaatagttcgacctacaggcacagggaagcatgcccggtatatttattaaaatgtagttaccagaatatttaaaattcacttgtgcctctcatattatttcttagagaattgcctcccttttgaaatctcaggctgcctgctctaaaacctggatgtgccaggaaagtaaaacatctgaaattttaaaacaattgtcattatattgattccatatatgaataacacatatatattattcattaatacaaataatcttacatacaaatgtaaatgcaaatattttacaggcagggccagtttctagttcacagaggaagccctgccagaaaaggatccaggaaaaacctataattcttgctttattcaacccagtgtcaaatcacatatgtcactcatggtctgaggcggcagggtagggaattgaactacatccaatcatgggtcttggagtggaaactatctaatcaggtgcacagctggagaagaatgggcagctttttggaagtacggaggccttggcctgtctctccactcagagctcaggacactagagccacctcaacataatcacctgttttttagttattttaacactccaaaagggaactagttttctcatgcattttccaaatgtgtggcaggcagagactcaaatctaactccctgttgccccagcctaactctggcttgcaatcagattttaaatttccagttctttcctgacactcaccaacactaactaaccttccataattcacaacattatcaactgttctttattgtacatttcagacacagtatttcaattcttctttttgtcaaaaagcagtggatgtcatttaaaaaaattttttctcatttgtaaacattttacaggagatgaaagcagagaataatcccctgacaccccactgtaaaaaaaataaataaaaagcggaaaacctttgtgcccctttgtttaaacttctcttggcacagacaccccatcagaaagcctttgggttcaggtttcattttggaaacttcacagggcaatacatcctcagccatcctgttattttcttggttttgaatttcaaaactgtttgaggattccccaagatgccaacagtggccatgactcttgaagtgtctagtaaatagcatcccttgtgtcatctcctctcagggaacagcccaaggtatgggaatgcagcctctctgtggagtggttgtttgagatgtgcctggaaggaatctctaggtatacccttgcgctaaaagcaaacccattaggtcattaagattttcttaccccaaagcttagtttccattccttagagacacattgcaggccaggcaaatggatgctgatattgaggaaaaaatgttctcagattggtgaagggagagaaaatatttcaaaggacaaagaaacccaacctagtgaggcagtgcaaaaacctgcaaagtaaaatgcacctcagggacacagaggagcacagggtagcgactcctggtaggatggtcatgacccacttcactgaaccagatgtgagtggggaaaatatcccaagtaatagaatggcttgacttgacccttgggtctgatatgtctgtgtttcaatcggcactgtcaccttctaattttgtcaccttgaaaatgtttttgtacttactttaacttcactttttaattaactgtaaactatgttttatcagtagagcttgaaaggcatgaaaatatttataaagcacattaagttggtgaattttgaataaaattaagtagtaatatatttcacttgttaaaaattgttacttgcctatttctttagcagaatgagtgtcgtacatttcccaggactgttttttatttgtctgagaggtgatttcaagcagaatctcacgacttactgttgggaatgttaccaggtgtattgatagggatagtctctcttccactacggtggtacgaaatgaatacatacctacaagcacgtgaggtagattaattgttaaattacataaatttatcacatcagttattcttttttcaaaacagagaacttctgatagtgagtatctctgttccatatgctgtcatctgggtgtttgagggtaacgctaagttttaggagctgggacttggcaccgcctggaagtgttcacatatgattgtttactaaatgatttgttatgaacataattaaattacatgtttattttctgaaagggatagatactttggcttttcttgttgagttataaaatgtaagccccttataactttcttttttaattttaattttattttttagacttagtgtcactcttgttgcccagtctggagtgcaatggcacgatattggctcactgtaacctccacctcccgggttcaagcaattctcctgcctcggcctcccaagtaactgggattacaggaatacacgaccacccccgtttaagtttgtatttttagtagagactgtgtttcttcatgttagtgaggctggtctcgaactcctgacctcaggtaatctgcccgcctcagcctcccaaaatgcagggattacaggcatgagccaccatgcccgaccataatttcctctcttttaaaccttagatttgaatgatttttgctggattcttcaaacatgaagtattttttaaattgaaaactaattgaatgactttaactggtaagtagaagtcttagaccgttgactaaaagctaaggctaacgttgaccctgcaaaagggggccactgaaggcccagttgattattcctgggtgtctgccctgcagacatcaaagtctgctcacaccaaccatagaaggagcctttgtcactgtcagaagatacagagctttggtaagctggaagttgacaggcagatgcagttggggttgagattgaagaaaagttgggatattctttctagaatggagttgttattgtcctgagactgtttatagactttgtctaagaagttacttaagaagtgttgtaacaaggaaaaagtacaaatgattagatctttgaggatctcaaaggttaggtggaaaagggttttatttcatagggaggagaaaataagtttacaaagaaggttggaaaggaagcacaggatggagggtagcaaaatcagatcccagataagataatgtttcatcttgaagtcagcctgttcttaggagggatatgtataaatatgggttgtaggttctctgaggctgtgggtgagtcaaagttcaggggctgagggaagaaggggaacaagcaaagttttgttaacaagtactctgttttgaccactgaagactaaattacagaatggttgttcatttttaaaaataggaatttgtaatctgtgtccgtctttgtgataggttaaaaaaaagggggggggggaacatccacaaagtcataatgggaagcacgtttctcttcactaagctgttctttgagaacacaaagaatgggggaatttctttaaatatagctatttccaggattaccttcacccacaactgttccttttcctagacatctctttcatttgtcagtttctgagttgtatttttataataaagtggtaaatataattagacttatttgttgagtttttttgagtaactctatcaaattatttaacttgaaaaggggtttatgggagtctcagatttataggcagtagctcagaagtatagatgggcttatgggacatgtgactaacctctgcagtgagaggggtgatgtgggacttagccctgaatttgtgggatctgtgcgaactctaagttgtgtcagaattaaattttggggcaagaaatgggtgttgaagaagcagtgggttttcagggaactttacacatttaggatcaaaagtgttgtaaggagaaagacaatgtgggggcctttgctggagagagactccaggtgtctcggggaaggtaggctctgctctgcacacaggctgctacgccatgcactgccctgtggttccaggcatcctcccatggtaagaaggaccgacgactctgagggaagaagttctgagaacagatgccttctaccctcctgccaacttgaagccaccacatgtttttcacccactgaacatacacactgcatgttgacgtggtcaagcccctctcaggacaaggctttggcatcaagattgttgcccatcctacctttcctcatagactttcccaccaaaaacccacacacgtgcctacaagacccctggcatatgttctacttcagacaccgaatctgcagtggcaacctggttttttcaccatcgcagatttctgtgccacctgatcataatctcgtcttcctgcatgaacatagaaataactcagagaaaagtttcacctgggtcagtgtctgtagcatgaaccagtcctcccaccaaccctgtacagtctctcacttctggtttcttaatagcaccttcccctcttttaccttttagttcacctcaaaccctttcttttatgtgcacacagtgtgcccaaggccacccctcagttgcctgaatccagcacctaccaaaattcagatgtccagtagttcaagaccatgggcctagactaagtttttgcagaaggcaatacaaattagaaatgagaggctctattctcccatttgaaaataaaaaaaagatttttttcttttcctttttcttaaacaatgtaatctggaaaactttaattagtaattttttgaggcagaatcttactcttttacttagcctgaagtgcaacggcataatcatagctcacggtaaccttaacctcttgggtttgagcagtcctcctgcatcaaccgcttaattacctaggactataggcatgaaccaccatgcctggctagctttatttatttttgtttttattttttttcaagacagtgtcttgctctgtgggctaggctggagtgtagtgccatgatcttgtctcaatgcaacctccacctcccaggttcaagcaattctcctgtctcagccttttgagtagctgggattacaggcgcacaccaccatgtctggctaattttttgttattattatttttagtagagaatgggttttaccattttggccaggctggtctccaccccctgacctcattatccacctgcctcagactcccaaagtgctgggattacaggtgtgagccaacatgcccagccatatttattttatttttttgtagtgacagaatttcaccatattgcctgtactggactcaaacatttggcttgaaggtatcctcatgccttggcctccccaaatgttcagattacaggcatgaaccaccatgagtggcctggaacacttttacatgtacctttttttctctgcttctttgaaatataagcaaatcattttaacagctaaataagccttctgtcattcttcatgacagagaattgtctttatctaagacctggaaactattgctttgttttttaatttggcaaagatttatttattttttattttcagtcctttgaagtaggcacagcgcagtacagtggctcatgtttttaatcctagtgctttgggaggctgagatgagagaattgcttgggcccaggagtttgagaccagcctgggcagcataatgagacactttctttataacaaattaaaatcaactagcagggcatggtggcacaggaggctgaggtgagagaatcatttgagctcaagagtttgaggctgcaatgagccatgatcactccaatctaccactgtattccagcctggatgacagagggagaccctgtctctaaataaataagcaaataaaaaaatgtgtttttccatacataaaaataagttaataaacagataaataaaatagacatggatttgcttagaataaagctaattataagataacagaaaagtgagcaccaaagatggggttcaccttagcaagtgattccagcctattaggacactcacagaattctccctgcagcatgaccaacatgaaagtagaatgtcatcatgtcaggctataccagcgttggaagactaaacactgtggggaagaacctcccttatggaatattatcaacaggtgagagaccagctcctgccctgatgggctacagagatgaattcttgagataacacattgcagaaacatgcatagagtagtttaaccttttttgtgtgtaaccctttctccattttcctgcaaaatcctccctagaaatagtgttcgcttttaagttttgagggtctggtaggactgaagctgcatgctgcaggagatacctggggtaggaaactaacacaaactgcagctacaggcacaaatactcatggcctaatgtaaagtgaaaacaatagaaaggtctttactgttattcacccaagtgagtgaacagagactttccacataaccaacttgccactgagactaatgaaggccagattccactggatcaagactatgagttactcatgggaagatcataggacacagcccagagagttttcatactggagtctgggtactgggtctgtcccggtcttctcgggtttctgtctgtagagacccctatgtggctgctcttaccacagcccggtgctggctgtggttgctggcttagtgcacctggtctttttccaaaaagagggaggagttggccacatcaagaagctcctcatcaatctgaatgcagctctgtaaaaagtgcctagaaaccacgcaaagaaaagtcagtggtctgccttgttttcaccgtatgtgacacctccactagaaattctgcttttctctgcactccagcctgggtgacagagcgaggcttcctcaaaaaggaaaaaagaaaaagaaaaagagagaaagaaagacagaaggaagtaaggaagaagaaagaaagaaaaagaaagaaagaaagagaaaaaaagaagaaagaaagaaagagaaagaaagaaagaagaaagaaagaaagaaagaagaaagaaagaaagaaagaagaaagaaagaaagaaagaaagaaagaaagaaagaaagaaagaaagaaagaaagaaagaaaataaaagagaaaagaaaagaaaagaaattctgctcttcagattaggcacataaggagaatctgtatgaatctccagcaaggaaggaaaccagaggacaagttaaagtcttggaattcacatctgagtacacagactcgttctccaaccctcttctttttattctgccagctatggcctaggtatgaacatgacaggtacacaagggttccaacacctgacaatctgcttcagtaaaagaagagtgccctccctcttgctccccatacaactcatggtactaagaaatggtgtgggacttcccagatgagttgacaagagaggcctggctctggggcctgtcctgagctgccctgtgttatttgtaggtgcacccagccaatagccaggggcatcaatgatgaggcctgagttgacatccgtgttttcagataaggcttttacactgagcctttgtaaagtcaaaactcagaaatttcagggcacaatgaaagaacatctcactctcttgagcatctctcactaacagaggtggatacagagctgtctcaagaatgtgggttcctggtttcttaactgatgttgggttgtcaccaagaaagtgtgttaaactcttcaaggttccatctactgggtcccttctttctgtaagacctacccaaaagccccactatgctactaattgctcagtctcctcttccatgtcaactcttcatttgtacacaagtatgcaaacacaacttccccttaattccctggaaagaactaaatgcagcctgggttccaggatataagagacagctggaacataaccttgtttttcttaccatctctgggacccaataaaagtcactgtgtatttgaggcttccccagcctccaagcatgcacagtggggatgatgctaacatctacttcctagggattgtattagatgtatataagataaaacataaaaatcatgtggtgttacctgtagataatgcacacacttagagatggaagcattaggagaatatgtagaaggtagcatgggccacaactcaaacaagcctgggtctggcagggtgatcttgggaatgtcacttctccactgcgcttcattttcattctgctccagtatgaagttgaaattaaatgtagatactgtcctctggcattcatatagtttagctgtgtgttccacccaaacttctctgtgtattgtaacccccaggtgttaagggagaaacctgaggggagatgattggattatggggacgggttctcctcatgctgttcttgtgatagtgagttctcatgagatctgatagtttcataagcatctggtacatcccatgctctcactcacttcacttgtcagccactgtaattggaaggtttctgaggtgccctcccaattatgtggaactgtgagtcaattaaacttcttttctttatcaattacccagtctcaagtacttcatcattgcagtatgacaaagtcctaatacagccattcaactttctagtgctttctctttatatttagaatcatatccatgtgccttctcacgtctatgacagggaaactcttcacaaaatctcacagtactaggtggttagtgactcagttttttattgaataaaatggcctacagcctgatgacagtaatatggcccttgggttttgaggaaaatatcatgttgtaggttggccaaaaaggagatagcagtccagctgaaatttgttttcttatactggctttaaggcagtgattagaaaaggcctaagaggtgggttctgtaagggattgctggaaggaaagtaggaatatggaaagtcatgagacatatactgtcatctcttcttgcttcctctcaagtcacatgcaaattcagggagagttagtatgaaacacacaatggaaatttgggctctaacatatgcaatctgattcttcatggacttcatttggccatatcagttccaacaatttcagccaatgtttaaaaatcttataagcagataacattttagtgtttcaacaagccatttcctatctttcattctgaaaatccattttaagtcatttttttaacagcataggggtacaaattcagcttctgtccaatgaaatacagaaaaggatatcacttttgtattagttcaggctgctatgccaaagaaccatagataagcagcttatagacaacaggacttaatttctcatacttctataggttcgaaatttgagatcaggttgtcagcacggttgagctctggtgatgactcgcttctgaatttcagactgcagacttcaagttttaccatcattttgcagaaggaggaagagagccctctgcggttccttgtataaagccagtaatctctattatgaaggtcccaccctcaggagttaagtacatctttcatccgtatagcattacaacgggggttacaattttaacataaatacaggagaaaaattattggaactctcaagatttttgtttccttttttttttttttgagacagtttcactcttgtatcccaggcaggagtgcagtggtgtgatctcggcttgctggaaccttcgcctcccaggttcaaatgattcccctgcgtcagtctcccaagtagctgggattacaggcatgcaccaccacaccttgctcattttgtacttttagaagagacggtggtttcaccatattgtccaggctgctttcaaacccctgacctcaggtgatccacccgtctcagcatcccaaagtgttgggattacaggtgtgagccaccgcaccctgtcaagatttttctaaagctctcatttttctcctactgggtttttcctgtttgcgccctcaatctttctctgtctctttttgtgtacacctttttgtctaattctctctctctattgtatacctcaaacacaggaagcaagcttcaatgctatgagatgctccatgtaaagaccaacataacagagcctgagggggtgctcagaccagtagagagaaggaaagtcaggctctccagccacactaaaccctgccaattttcacatgagtcagcttaaaggctcatgctttcccagtccagcttcagttaagaccacagtcccaatgtcataaaagacctaaaggcagaggtacccaactgaactgtgtccagattctggtccacataaattatgagatattatatgttgttgaaaagtgctgacttttagggcaatgttgtcagaaaggagcagatatctaacctcatctcccaggccctaggattctccatccctctacttatatcttcctcaggctgtctgcagccaaactttctaacctctgccgaactcacacctatgagtctcttcactaagggtggcttctccctgacacatacttgtgcagagatgtctccctgttgtcatccttatcatggattaaacatcaccacaatgaggccttagttcctcccatgcaataattttccagcttttcttctcaacattccactttatattatagtccttcctcttttctttcacatatacttgctttagtgcttttatccagctgtcctcagaatgtttggtcctgggttggggggtgcaggcatcatgtaataattttctgtaccacgttgcacccacctggttagctggcaaagggtgagcgcaagggaaaaaagactggctaagtgattatatggaggatctctaatatcccttcctcttttgaccacctgataatgtggagatcattgataacaacatgagatgtgtgactcttacttgttccagctgctccagcaaagctcagtgggcaccagaaacagagctggctgtaaccacctccaggccatcactaactctatggcccaatgcaggagcactatggaacaaatcaggtatcttgatttttctgtcctcaagacactggttcttcaaggtcctaggggataaagtagcagaatctgaaggccccaagtacaatgagtgaccttggaatccccctttgccttctatttgcctctaccttttgggttgtgctatttatccatgagatatcctccccttatccagtgaaattagtttctaccactttcaaatgaggaccttaagaacccaacaggagctgggattttccgtggacttcagcctcagagtccaatgctctggaacatttagctccgtctcatcttcatctacccaagatgcctctgaagtggccatgcctccctctgatttgaaggacctacagagagtggatgcatttctgcacagtctcagagcaagaatcagggctggaagacacttatgagtatgtgaaatcgtcgaggtcacccagttcaaacagccctatttatgaggaagaaaacaggctttcctgcaggcattctctacattaggctgaggtggagcatagctcattttacttccaggtgccctcagagctggatgcaaaaccccagtcctgtcatcttgaaattgacatggagaggtccccatgtgaacagaaccctggatctgctcattctctgtgcccctgaatgtgaagctacaggctctaacttccaaagcaaacctgataggtgggatggagccaaggcctaggaagctggagctctctctaatgctctggagcctgcccacctcctgagatctggatcagtccctgcctcttttggggcctcattttcccaattgtaatgtaatgagaaattaaatgtaaaattgcataagcatatgctctgtgagaatttggtgtcagagtcctcaatactggatgatatattttggtgggaggggtttgggccccagaggttctcgggactcctgacatatccattgcagtaggtgtagagctcaggagatccagatcttctttcctgagccagctgattacaatacaatggaccacgggctatgatcttaaatatgatttcacaggattccccaccttcagccaccatctgctctgtgcttcccttattttggggagctgatgacaacctccattatagtgagagagtccaagaaactagacttgtggacctggagaaaagaaaaaaacacttttctatttctctcaaactgtagaatctgttgtcaaatatttaattttgattccatctgagcttgataatacgttcatgtgttaagagctgcttaaatttattttttctgtggtgtgggataatgtcttttcccatattttaaatcaacttctaaaagctctctttaaagtggagatgtgaacatctttgtgatataaactgcacatatttgttgcgagattgttctttttctctttgttaaaatgttttgttttattctggtttggatgtccttcagggttttgttttgtggctatttattactacaatgcaacttctcccctaattgactgacaggtttgtacattctcaataaaatattttggtaaagtctttgtaaaaactgtgtagacaattttacagttttcataaacataaaacagtcaagactgtcatgatgaaaaagaaagattgagggcttaaaaattaaaatatgacacagctaaagtagtgtgcaaagggaaatttatggcactaaatgcccacaagagaaagcagaaaaggtctaaaatcggcatcataatatcacaattaaaaatctagggaagcaagagcaaacaaattcaaaagctagcagaagacaagaaataattaagatcacagcagaactgaaggagatagacacacaaaaagcccgtccaaaaaatcaacgaatccaggagctgtttttttgaaaagatcaagaaataaataaactgctagccagagtaataaggaagaagagaagaatcaaatacatgcaataggaaatgataaaggggatataaccattgatccacagaaataaaaattaccattagagaatattataaaaaactctttacaaattaactagaaaatctagacgaaatggataaattcctggacacatataccctcccaagtccaaaccagtaagaagtcgaatgcctgaatatgccaataacaagttctaaaattgaggcagtaactaatagcctaccaaccaaaagaagtccagaaccagaaggattcacagccgaattctaccaaaggtacaaagaggagctggtaccattccttctgaaactatttcaaacaatagaaaagaggtactcctccttaactcattttatgcatccagcatcatcctgaaaccaaaacttggcaaagacacaccagaaaaagaaaatttcaggcccgtatccctgatgaatatcgatgcgaaaatcctcaataaaatactggcaaaccgaatccagcagcacatcaaaaagcttatccaccacgatctagtcagcttaatccctcggatgcaaagcttgttcaacatatgcaaatcaataaatgtattccatcacataaacagaactaatgacaaaaaccacatgattatctcaatagatgcaaaaaaggccttcagcaaaattcaacacctcttcatggtaaaaactctcaatgaattatgtattgatggaacttatctcaacatattaagagctatttatgacaaacgcacagccaatatactgaatgggaaaaaacttgaaacattccttttgaaaatctgcacaaaacaagaataccctctctcatcactcctattcaatatagtattggaagttctggccagggcaatcagtcaagagaaagaaacaaagcgtaatcaaataggaagaggaactcaagttgtctctgtttgcagctgacatgattgtatatttagaaaaccccatcgtctcagcccaaaatctccttaaaccaatatgcaacttcaaaaaagtctcagtatacaaaatcagtgttcaaaaatcacaagaattcctatacacaataatagacaaacagagagccaaatcatgcatgaactctcattcacaattgttacaaagagaataaaatacctaggaatccaacttaaaagggatgggaaggacttcttcaaggagatctacaaaccactgctcaaggaaataagagaggacacaaacaaatgaaaaacaatccgtgctcatggataggaagaatcaatattgtgaaaatggccatactgcccaaagtaatttataaattcagtgttatccccatcaagctcccattgactttctttacataattagaaaaaaaactactttaaatttcatatggaatcaaaaaagatcctgcatagacaagacaatcctaagcaaaaagaacaaaagtggaggcatcacactagctatcttcaaactatactaaaaggccacagtaaccaagacagtatggtactggtaccaaaacagatatattgacaaatggaacagaacagaggccccagaaataacatcaaacatctacaaccatctgatctttgatgaacctgacaaaaacaagtaatggggaaaggattccttatttaataaatggtgttgggaaaactagatagccatatgcaaaaaaatgaaactggacgtcttccttactagttatacaaaaattaactgaagatggattaaagacttaaatgtaagacttaaaaccataaaaaccccccaaaaaacaaaggcattaccattcaggacataggcgtgggcaaagacttcatgactaaaacagcaaaaacaatggcaacaaaagccaaaattgacaaacgagatgtaattaaagtaaagagcttcttcacaacaaaagaaactatcatcagagtgaacaggcaacccacagaaaggagaaaatttatgcaatctatccatctgacaatgggctaatatgcagaatctacaaaaaacttaagcaaatttacaagaaaaaaacaaacaaccatatcaaaaatgggcaaaggacatgaacagacacttctgaaaagaagacatttatgcagccaacaaacatatgaaaaaaaaactcatcatcactggtcattagataaatgcaaatcaaaaacacagtgagaaaccatctcactccagttagaatggtgatcattggaaaaatcaggaaacaacagatgctggagaggatgtggagaaataggaacacttttacactgttggtgagagtgtaaattagttcaaccattgtggaagacagtatggcaattcctcaaggatctacaatgagaaataccatttgatccagcaatcccattactgggtatataaccaaatgattataaattattctactacttagacacatgcaaacatatgtttattatggcactgtgcacaagagcaaaaactttgaaccaaaccaaatgcccatcagtggtagaatgaataaagaaaatgtggcatgtatacatcatggaatacaatgcagtcataaaaaggatgagttcatgtcctttgcagggacatggatgaagctggaaaccaccattctcagcaaactaacacaagagtagaaaagcaaacatcacatgttctctctcatagttgggagttaaacaaagagaacacagggacacaggaaggggaacaccacacactggagcctgtcaggaagtgggggactatgggagggatagcattagaagatatattcctggcctaggccactattgcgattttctaaattttgtttcaaaaacatgatgtttcaaaaattgttattgatatgtaattatacaaatatatagttcagaaaaaagaatcaacattaattatgctttttccaaaatactttatggttttgagctcttctagcagtgacatttttgctgtaggtagttgctctatatctggtatattcatcatagcatcctttgtaccctttacacttatccttcaatttcccactctccttaagtgtaaattttcaaggccagagctcccatatcttcccaatattactttttgaaaagaagctcctatgtactgttttgtctgggtcttgttggatataatgctaaaagagctggaaaataataattttttaaaaaattcggtgatgaaattaaggtaaatatattttataaatctaatgaacaaaatgaggccagctgagaacacaatgatagttgaagaagaacctgagatcctgtttctctcaatggatgtatgaacttaactgcaattgggtgagcaaagccagttgagtttgtagcacccctcatgagaaaaaagccaaccataaccacatttagaagaaagaaaatttggttacatttctgcactacagaacagtgcagttagataaaattctgtccattccatgattctccctcgggaaagaaaacagagtgaaacgtgtatgcaaacttctgacttattgatttatacctttaacatttagtgttgaccagaatagagatagagtttaaatgacagcttgggtcgactgagaataaagataaatatttcttacaacaaagagactgtagtgcctgcaacagtgacaaagagaagagactaaaggctcctaagaggaaagagaggtaaaccttattaacaagaaaatacatacagtacaaagaagacacattttgacaacagattggagaagctcccggaatgactagtgtggctgaatattgtcaattttcccatgtacaaagctttttcataaaggataaaataggtagtggtttcttaattgaccaaaaccttaacaaaaccacagtacttaaaagcaaccaggaaatatagcctaatgaaacgagaaaaatatatattcaagtgaccctaaagaagtggagatctatgaattattttttaacttaaaatcattttatttttctttattttttcattttatacacaggatcttactctatctcctgggacagattgcagtggtgcaatcacagctcactgtaacctcaaatttctgaagtaaagcagtcatgcctcctatgtctcctgagtaaatatgaccacagttgggcacactaccacacctgtatagtttctttaaaagaatctgtacaaacagaatgttgttatgttgcctcggctggtctcaaactcctggtctcaggcaatcctactgcctcagtctgaaagtgctggcatgagccaccatacctggaattgtttctcttttaagaaaaaaggactttaaatcattaatagtaaaataaaacaaagaaaggcattgcataacgatagagagttcaattcaacaagaagacttaactatcctaaatatagatgcacccaactttggggaacatagagttatacaacaagtactgctagacctacaataagactcaagtagccacgcaataatagtagggaaacgcaactccccaataacagtgtttgtcagattatctaggcagaaacttaacaaagaaattctggagtttgatttcgcacttgatcaattgaaactaatagacatttatagtatacaccacacatcatctaaggaacataaattcttctcatcgctcacagaatatactctaggattgaccacttcctagccataaagcaattatccatacattttttaaaaatgaaaattatgccaaccatactgtcaggccacaatggaaaaaagataaatatcaataccaacaaaatctcacaaaatcacagaatggcattgaaattaaacaacttgctcctgaatgaattttgggtaaacaacaaaattgaggcagaaacttaaaaaaaatttgaaataaatgaagagacacaatatactaaaatgtctgggttgtaggaaaagctctgttaagaggaaagttgagagtgctaaatacctgcatcaagaagttagaatgatctcaaactaacaatttaacatcacacttagagaaactagaaaaacaaaaacaaactaaccccaaagctggcagaatggcaaaaatattcacaacctataaacctgacaaaatctaatactcagaatctataagaaacttaaagaattcacaagcaaaaaattaccccatgaaaaagtgggcaataacagacaatgttcaaaagaatacatacaagtggccaaacaacatgaaaaaagcttatcactaaccatcaaggaaatgtaaataaaaaccacagtaagacaccatcgtacaccagttagaatggcttttgttaaaaagtaaaatgatagtagatattggtggggttttagagggaaaaaaccacttatacactgtttataggaatataaattagttcagccactgtggagagcagcttggagattttccaaataactgagagttgaactatgattcaacgcagaatttcaccgctgggtgtatacccagaagagaataaactattctaccaaaacagcacatgcacttgttggttcatcactgcattatttataacaggaaagacatgaatcaacctacgtgactattaatggtatttttttttttttgagatgaagtctcactctgttgcccaggctggagtgcagtggcactatctcagctcactacaacctccacctcccaggttcaagcaattctcctgcctcagccacccgagtagctgggactacaggctcatgacaacacgtccggctaacttttgtattttcagtagagacgggggtttcattatgctgtccaggatggtctcgatctcctgacctcatgatccactcaccttggcctcccacagtgctgggattacaggcatcagccaccgtgtccagcctattaatgctaaattgaatttaaaaagtgtcacatgtacagcaatactacttagcaaaaacaacaacaacaacaaaaaaacttgtcctttgcagcaacattaatacaactaaaggtcattctacaatcaaattaatgcagaaatggaaaacaaaaatactgatgttctcacttataaatggaaattaacactgggtacacatggacataaaaataaaaataaaagacaactcttagagggtggagagagggagggatcaagaactgaaaaactgtctatttagtactatgctcactgcataagtgatggaattacttatatttcaaacctcagcactatacaaaatacccatgtaaaaaacctgtgtaggtacctcctaaatctaaaacaaatttgaaattctaaaaggcggtcttactctctcacccagacaggaatacaatatcatggttataactcaatgcagcctcaaattcctgggaactcaaggaataatcttacatcagcctccaacttccgagactacaggaacattccaccattcatgattaatctgtaaaaatattttttacatatagcttctcacaatattgcccagggtggtctcaaactcctagccttaagtaattgatatggtttggctctctgtccccaaccaaatctcaccttgaattgtaataatctccacatgtcctgggaggtactctgtgggaggtaattgaatcatgggggtgggattttcccatgctgttctcatgatagcaaaaaagtctcacgtgatctgatggttttataagtggagattcctctgaacaaagtctcttgcttgctccaataattgtgagacctccccagccatgtgaaactgtgaggccattaacctttttcattatgaattatccagtcttggttatgtctttattagctgcatgagaatttattaatacagtaatccccttgccttagctttcaaagtagctggaattagacacaaatatcaatgtgcctggctaaaacacctagcttaaagatgctcattcagctaaagaagaacatagaaagctaaacagaaaaagaaaacaattcatgaagataatgagattatcaatgaagtgattaaaagtataaaatagaaacataaagtgtggagctgaaaaataaaatacctgaatttagagattcactagaaggtccaacaactggtttgatctagcaggaaaaaatccagcaagcttcataaaaagtcatttgaaattatatggtgaggagggtaaaaataattttaaaaattaagaaagcctaagggacttatgggataccattaagatggccaatatacttctaatgggaattctaaaataaaaagagagaaaagagagcagcaaagttatttcaagaaacaaacagtggctgagaactctcaaaatttgagggagaaaatggcctaaaatttaatgaaactttaccaactagtagcaacacagggagacccatgacaagacacattttaatcagagattcaaatgttaaaacaccgagaatcttgaagtcagcaagaaaaaatgacttagcatgtacaatgttacccctataggatgaccagcagatgtctcagccaatagaatgcaggcaagaggttgtaggatgacatactcaaagtgctgaaaaaaatggcaaataccaaccaagaacactatgtctgccaaagctatcatttcaaatgaattaaaaaataaaaataaagaatattcaagatcaacgaaaactgtattaatttatgcacactaggcctgtattaaaaaatgctagtcattcacattaaaaaataaaataatgatgagagcaacatagaattatgtaaaatataaagttttctaacagataattatgtacagaattataatattctttgttattataatgaagatgcacagaatacttttaattctgctatgtagttgagataacaaagacttaaaaatgactatataactgtgccaatagattcacaatataaaatgatgtaattcgcgacatcaataaaacacatagggagccataaagaggcagggttttatatgctatagtagttatttttggtaatatctatagtaacaacaaagaaaatacctatagtacttaggattttgagactagtctggtcaacatggcaaaaccctgtctctatgaaaaataacaaaaattagccaggagtagtggtgcacatctgtggtcccaggtactcagaaggctgtggtgggaggattgtttgagttgagcctgagaggcagagcttgcaataagcagagattgtgccactgccctccagcctgggcgacagagcaagaccctgtcaaaaaaaaaaaaaaggaaatacctatagtacacacacacaaagacatacacacagagagagtagtgagaaaagaagtaaaacatgtcactataaaaatcaataatacgctaagaaagagaacaagagagaaaaacaggaaataatagctacaggacaggccaggagctgtggctcatgcctgtaatcccagcaatttgggaggccgaggtggggggatcaacgaggtcaggagattgagaccatcctggctaacacggtgaaaccctgtctctactaaaaaaaataaataaataaaaataaaaatagccgggcatggtggcgggtgcctgtattcccagctgctggggaatctgaggcaggagaatggcgtgaatccgggaggtggagcttgcagtgagccaagattgcaccactgcactccagcctgggcaacagagcaaaactccttctcaaaagaaaaagctacaggacctaaaacaaaaaagaaacaaaattcaatagaaagtcataggaaatcattcccttttagtaatgattttttatatatataaattatgtcaatcaaaaacatactttcactaaataaattcatgaaacaagattcaactctctgcttcctacaaatgaccacattatgatctggaacacgcataagccatacatgaaagaataaaaaaaattaaatgcaaaatcaaatattgtcatggtagacaaaatatatattatatcaaaaacttcctcaagagagaagaagaaaaagacaataaaaacaacaacaataaaagcaacaaaaaacaacatacatcaataaaagcaacaataaaacaacatacaacaataaaagcaacagtaatgtatgtgccttacatcacagttcccaaaatatgaagcaacattttacagaattgaaacatgaagtagccagcacataacagtagatgacttttttatcagacttttagtaatgtaaattaaaaaacaaacataagatgaataagtaaacagaggatttcaacaacacaatagaacaattagacctaacagtcatatttatgtctctccactcaacagtagaatatgcaatacttttaatcacacatgccaaaatattccagatagaccacctgttaagttaaaaaacacatcttagcaaatttaagcagatggaattacacaaattattcctaactatgatacaataaaacaagaagttaaaaacactagcatgtcaaagaataagtaaaattaaacaacaaattctcaaaaacactcttgttcaagaggttatagacttaatattgttaaaatgtcactacaaccaaaagtggtctacggattcaatgttctttcttttcttttctttctatttattttgagacggagttttgctcttgttgcccaaggtggagtgcaatggtgcgatctcagttcactgcagcctccacctcctgggttcaagctgttctcctgcctcagcctcctgagtagctgggaatacaggcatgtgccaccacacctggctaattttgtatttttagtagagatggggtttctccatggctggtctggaactcctgacctcaggtgatccaccttcctcagcctcccaaagtgctgggattacaggtatgagccacgaccctcagctgattcaatatactttctatcaaaataccaatgaaactttttgcagaagttttaaaatattctacaatttttatggaatttcaagttatcacaaacagccaaaaaatattgggaaaaaaatataaagacagaggcatcatgctttctattttcaaaacatactacaaagatatagtaataaaaacagtttggtactgacataaagacaaatgaatgatgaaacagatgagacagtccagacataagtcctcatgggtatagtaaacatatttttaaaatgtgttccaagaatcacaaaaaggaaagaacagtctcttcaacaaacagtattgggaataataaaaatttacaaggaaaaaataacaaagttagaccttaccttgcaccagataaaaacataaactcaaggctgggtgtagtggctcacacctgtaatccctgcactttgggtgacagagacaagtgaatcacaaggtcaggatatcaagaccatcctggccaacatggggaaaccacgtctctactaaaaatacaaacaaaaattagttggcagtggtggcacacgcctgcagttccacacactcgggaggctgatgcaggagaatctctggaacccgggaggcaagagtttcagtgagctgagatcatgccactgcgctccagcctggtgacagagaaagactccaccacaaataaagaaataaactcaaaataactaatttttggtagctattaaaatggaatttaaaattttatcgctatcatcatacagaaagctactactgtgttaattttctgcaatgttacagaatttgtttagtagttctaatagtttttggtgtagtgtttagagtttttcacatataagattattttgtccacaatgagagaccatttgacttcatcctttccaattagtataacttttatttcttcctcttgcctaatttccttggctaggacttccagtactatgttgaataagagggctgaaagtttggatgatttgtcttgttccagatctcagagagaaagctttcaacttttccttattcagtataaagttagcattgctttttcataaatggcctttactgtattaaggcacataccttctattcctaacttgttgagagttttcatcataatgaaggctgaatttcatccaattcttcttctgcatatgcaaaagctacaaaaatgaaaatacttaatgtgatggctaatacagggtgtcaaattgattggattggaggataaaaagcattgatcctgggtgtgtctgtgagggtgttgccaaaggagattaacatttgagtcagtgggctgggaaagggagatccactcttaattgggtgagcaccatctaatgagctgacagtgaatataaagcaggcagaaaaacgtgaaaaagagagactggcctaagctcccagactacatctttctcctgtgctggacacttgcagccctcaaacatcagactccaagttcttcagctttgggacatggaccgcctctccttgctcctcaaacttgcagacaacctattgtgggatctcatgatctctctagggaagcccaactaatacacctagcaacaaacttaactaaaaaggtaaaagatctctactctgaaaacgacaaaacatggataaaaaatataaaatacaaatgaataaatgaaaaaatattgtgtttatacactggaagaatactcttgatctatctacccaaagtgatctacagacttaatgtgatttttatcaaagtaccaatgacattttttcacagaaataaaaaaaatttaaatttatatggatccacaaaaaactctgaatagacaaagcaactttgagcaaaataagcaaagctaaaggcatcacttcatcaaacttcaaaacttgctataaagctacagtaaccaaaacagcactgtactggcataaaaacaaactcatagactaatgtgccgaataagcccagaagttaatttatgcacctaaagccaactgattgtcaacaaaattgccaagaacacactttagagaaaagctaatctctttaataaatggtgcagggccacttaaatatttatatgcagaaaaataatactagacccttgtaccttgccatatatgataatcaactaaaactaaagacttaaatgtaatgccatcaattatgaaactattagagaaaaacataaaaaaatgctttataacattggatggggaaaggattattaaaataagatttcaaaacatgggcaacaaaatcgagaataagcaaacaacattatgtcaaactaaaatgcttttccatattaaaaaaacaactagaagtttgaagagacagcttaggcaatgacagaaaatgttttcatatacatgtgacaaaaggctaatattcagaatatataagaaactttaaaatctcaaaataaaatacacttataatctaactttaaaaatgcaaaagatcttaatagatgtttgtcaaaaagagatacaaaaatgctaactggaacataaaaagatgctctacattactaatcaccaaggaaatgcaaatccaaaccataatgaagtaccgcctcattcccattagagtggctataataaaaataaataaataaatcaagaactaatgaggatataaaaaagagtggatgtataccttgttggtggaattgtaaattagtatggccattatagaaaatagtatggaggtttctgaaagaaattaaaaatatatctattatatgatccagcaattttacttctgggtgtatatccaaaagaaaggatattactgtgtcaaaaagatatttgcattcccatgttcattacagaactatttataatagcttatatatggaatcaattcaaatgtacagcaacagataaatggataaggaaaatgtactatatatacacagcgaaatactattcagccataagaaagcataaaattctgtcagttaaaagagcatggatgaaccttgagcataccatgttaagtaaaataagccacatagagaaacacaaatactttatgatcttattatctcactcatttgaggaacctgaaaaaaagggttgatagaagcaaagagtacaacaggggttaccagagactgaagcaggaggatgggaaaaggttgcttcacaggtattgtgttatgattagataggggaaataagtttttgttttttattacacagtagaataataataattaatgaaaagttatctcatattacaaaatagctaaaagagaccagtttcggtggcacattcttgcaatccatacattttgggagactgaggtaggagaatcacttgacgtcagaagttcaagatgagcctggacaacatagtgtgaccctgtctctatgaaaaattaaaacattagccaggcatggtggcagcttcctgtagtctcagctaattgggaaactaaggttagaagactgtttgaagttacagtgagctaagattgcaccactgcacaccagtctgggtgttagagcaagatcctgtctctaaaaaaatttaatacttaaagataaaataaaatagctagagaagaagcttttgaatattctcaccacaaaaataacaaatgcatgaggcaacaagtatagaagtactctgatttttattgttatacaacatatatatataattgtttccccaaaatatgcacaattacatgtgtcaattttaaaaaatgaatgaagactataatgtaaaacctatagctgtaaaattcctagcacaatacagaagggtgaagcttcatgacaactggtcgtggcaataatttgggggacgtaacatcaacggatgagacaacaaaagcaagggaatacacatggtactgaatcagtgtatgaaaaatatcccaaacagacaaagcagaacatggaatagatatatgcacattgtagtattagtcacaaacatgttacctggaagcaaatgtacccttaaggatgagtagattcagcaaacagggcacgtacaatcactgggatagcattcagccttaaaaataaggaaatcttgaaaagtactacaataaggacaaatattcaaaacattctgttaagtaaaataagacagtcaaaaaggaaagctgtataattacactcatgtaaaatatttagtcaaactcaaagaaaccaagtgtcatagtctcagcagtgcaccaagatgtaacagtctctcgtagtctgagataacatccagagttctttgttctacctctaaggagattaaggagtgtaaacacaaaggtgaggttggagtgaaagtttaagaagcaagagaagaaagctctttgccagcagagataggtgtctgaaagtggtgccctctacgaggctgggtccagggtttttatggactgggaagggaaggatatgtgcctagttcacaggctgtcttgaaaaacgtgtggctcagcttggcccaggcctttggcccaggaccaatcaggagctgaagggatgattgatagatgctgcttagcttggcccaagacttaccagaagctaaggtgaaagtttggccaaggagcttggcacgggagcaatcaggggctgaagtaattattcatagaggtcagacttacagtccaaataaaggagaatgtctaccggaatgtaccagattccacagtgtccatgccaacaaaaagagaaggaacattttcctgggagcccactgactgtacaaagacaaaggtgtttcttttttttttctttttcttgtctttctttcttttttttgagatgtactttctttttttattttattttattttttttgcagttttgctcttgttgcccagcctggagtgcaatggtgcgatctcggctcacagcaacctccacctcctgggttctagcgattctcctgcctcagcctcccaagtagctgggattataggcatgcagcaccatgcctggctagttttgtatttttagtaaagacagggtttgtccatcttggtcatgctggtctcaaactcccgacctcagatgatccgcccacagctgcctccgacattgttggaattacaggcatgatccaccgtggctggccaaacaaaggcatttctgtgctaggtcgttcttgttcctttatctgagtgagctggaggtttgtacaagtttttatccaaatgggccagaggtttttctatctctgcagccacgggcatgtctccaagcacaacaacatatgttagttcccttgttagtgtctgcagcttgattttttccaggcttctttacatgttatgcagggatgaggcactgaccagggactttccagggactcttctcttgctatctacctaaggtaagctaactaacttctttcacaagtaatgagtattcacttttacttttgtaagacaaaaattatctaaaagctactgcaaaacaatagaactatactaaccacttctaaaccatatacttaaaatttcagaaatgacaatggcatgtttttaactacaattagaaatttaagactaactaaaaggcacagttagaaaacctttcaaacatcaccttcaaataacaaagggttattctcacacaattatatggatttaaactatatgttgattgtaaatttaagattatttccctgatgactcaccaagatagaataaaataatcactggaaaccaagaaaagagggaaatttatagcactaatgtccacatcaaaaagctagaaagggctgggcgtggtggctcatgcctgtaattccagcactttgggaggctggggtaggcaaatcacttaaggccagatgttcaagaccagcctggaacacacagcaaaaccccacctctacaaaaaaaaattcaaaaattagctggtttttgtgatgcacatctgtaatcccagctactcaggaagctgagacagcagaaatcacttaaaactgagaagtggaggttgcagtgagcagagatcatgccactgtactccagcctgggtgacagagtgagactctgccacaagaaaaaaaagagaaactagaaagatctaaagttaacagcctaacatcttgattaaaagaactagaaaaccaagtgaaaactaaccagaaaggtagcagaaaacaagaaataaccaagatcaaagtagagctgaaggagatagagacactgaaaactcttccaaaaaaaaaaagtcaacaaatccaggagctgttttatgaaaaaaattaataaactagatggaacactagctaggcaaataaataagaaaagaaaggagaaccaaacacaattagaaataataagggagatatcatcactggtcccatggaaataagaacaaccatcagagaacactataaacatctgtatgcacataaaccagaaaatctagaatagacaatttccttgcaaaataaaccctccacaagactgaaccctgaatagatcaataatgtgttctgaaactgaggcagtaataactagcctaccaagcaagctgaatttgaccagaggtacaaagaggagatggtaccttttctcctaaaaccatccaaaaaaaattgaagacaaagttctctgtaactcattctatcaggccagcatcatccagataccaaaacctaacatagatactacaacaacaacaacaacaacaacaacacatcatgccaatgtctttggtaaacactgtgcaaaaatcctcaataaaatactggcaaaccaaatccagcagcatattaaaaagttcatctgcaacaatggagttggctttgtccccaggatgcaaggttgattcaacaaatgcaaatcaataaatgtgactcatcacataaagagaactaaataaaaagccacatgattatctcaataaatgcagaaaaagcatccaataaaattcagcattccttcaggtttaaaattctcaataaactaggaagtgaagaaacatacctgaaaataataagagccatatacaacaaacccacaaccaatatcatactgaatgtgcaaaagctagaaacgttccacctgaaaactggcacaagaaaagaatgccctctttcaccactaccattcaatatagtatcagaagccttggccaggaaaatcaggccagaggaagaaataaagagtattctaatagaaagagaggaagtcaaattatctttgtttgcagatgacctgatcctacatctagaaaacctcattgtctcaggcccaaagcttcttaaggtgataagcaacagtagcaaaatctcaggatataaaatcaatgtgcaaaagtagctagcattcccatgcacaaacaacaggcaagcagggagacaaatcatgaatgaactttcattcacatttgctacaaagagaaaaaaatacctaggaatacagctaagaaagaaagtgaaggacctcttcaaggagaaccacaaacaactgctcagagaaatcagagtggacacaaaacagatggagaaatattccatgctcatggagaggaagaatcagtatcatgaatatgggcatatggccctaagtaattcatagattcaatgctattcccattgaactactgacattcttcagagaattagaaaaataaaaacttttaaagttcatatggaaccaaaaaagagcccaaatagccaagccaaccttaagaaaaaaaaaaaaaaagctggaagtgtcactctacctaacttcaaactatactagaagagtacagtaacaaaaacagcatggtactggtatagaaacagacacatagacaaatgaaacaaagtagagaacctagaaataaagccaaaaacctacaacaacctgatctttgacaaagttaacaaaaacaaggaattagggaaaggtgtccctattcaaaaaatggtgctaggagaactggctagccatatgcagagaatttaaactggaacccttcttaacaccatgtacaaaaattaactcaagatggattaaagacttaaatgtacaacccaaaactataaaacccttagaagaaaaaatctagataataccattcaggatataggcatgagaaaagactttatgacagaaaggcaaaaagctatagcaacaaaagcaaaaattgactaatggggtctaattaaactaaagagcttctgcggagccaaagaaactatcatcagagcagacaacctagagaatgggagaaaaattatgcaacctatccatctcacaaatgtctaatatccagaatctaggaggaatttaacaaaatttacaagagaaaaaaaaaaggccccattaaaaaagggtcaaagaacatgaacagacatatctcaaaagaggacatacatgtgcccaacaaacatgaaaagctcaacatcactgataactgcataaatacaaatcaaaaccataatgagataccatctcacacaaattataatggctattaataaaaagtaaaaaaaaaaaaaacagatgctggcgaggttgtggagaaaagggaacacttttacactgttggtgggagtgtaaattatttcaagcattgaggaagagagtgtggagattcctcaaagacctagaagcagaactaccatttgacccagcaataccattacacccaaaggaatataaataattctattttaaaaatacatgtatacaaatgttcattgcagcactatttacaatagcaacatcatgtaatcaatctacatgcccatcaatgatacactggataaaggaaatgtggtacacatacaccatggaacactatgaagccataaaatgtaatgagatgatgtcccttgcagggacatggttggaatttgaagccattactcccagcaaactaatgcaggaacagaaaaccaaacaccgcctattattattctaacttattagcagaagcagatcaatgagaacacatggacacatcaggaagaacaacacacactggacacctgtttcatggcatgggggaggggaaggagagcatcaggaagaatagctgcggatgctgggcttggtacctgggtgatgagatgatctgtgcagtaaaccacagtggtacgcatttatgtatgtaagagacctgcatactctgcacatggacccctaaacttaaaataaaagttgaaaaataaactttatcacatatggacccctgaacttaaaataaaacttgaaaaaaaaatgtgtttctggtggattctctatgttagacccaaactgaggatcttgaagctctcgctgggggaatcggggatgggggcacactggggagccgctgccaaggccaaccaccctccctacaagccacctcccttcccggccagtatggaaaggagaaggggtatgtgaacagctgtggaggtcagaatctcgggaactgaatcaggccccagcccatgccccccagcccagccctcaggattgttagatggaacaaggctccatcatcacccaggcatggagggaagatgccctggtccttaccaagcaaggcctggtttccaaagtcctctccgaagaggcctcatgtttgccacatcttaaaagtcccctttctgctgttcttgcacccagcatgttggacagtcaagttcccccgctgagcaatccacacataaggagggagtcaacaccattgctatgtcggatcagctccagcgtctccaatatcagttttatcagatcccaggaacctgcctgctcccagaggtgacagagaaaaatcaaggaaggatctgtatggtcactgacctggatgaaacccttgtgcatagctcctttaagccaatcagcaatgctgactgcctagtgcctgtagagcttgaggggaccatgcaccagatccatgtgctcatgaggccttatatggatgagttcctgacatgaatggaggaaatgtttaaatgtgttttcgtcattgctctcttcttcccagcctgaacaagtaggcagatcctgtgacgggtgagctggacgggtatgggatggtctggggctgcctgtcccatgagtcatgtttgtttcaccagggctgctatgtcaaggacgtcagccatctggggagggacctgaggaaaactcatcctggacaactcgcctgcttcttacatcttccacacagagaatgcagtgcctgtgcagtcctggtttgataacattccagacagcagctgctgcacctgatatcattatttgaggagatgagtggaggagcagagggtgtctacactagccttgggcagcagtgggcccttaaccttccctgcttcccagcaatggccatcacagtaggggattttcccacactgtgcctttatgaacagcctgaaagagtgaaggctggaacacctacccacatgggcctggaaacagtgagaagtgattgaaaagagctttaggacagcttagatgcccagtgggtgaatgccagaccaaggatacccagagctacctgccatcaagttgttgggttcccgagatgggggtgtgagagaaagaaagacagcatgtgtgttttgctatgaactgtggccccaagtatatagtgtttcagtagaggagaagctgaaggacaaagactcttcccaagctagcttgtctcctctcctgtcaccctatgagcccctgagatccatagggatgaagagtattgaaggctccgttgcaaacctggtctttcttcagtgctgcaaggcctatgccaaggagaaaggaaaggtatgcctttgggtgttccaggcacacatctttctgaaatatttctccagccagttgttgcagacaaaagacgacatttctgggaagatggggacttatgtccagacgagtacccaaactatcaggtcttctggcccaaaggctatttttacttacctctagccaagtgcctgggatggatcctttctgcgtctcaccaaggctcaccacttagccatagcctcaaacccgtggggaaggaaggtctccccgccctgcaagaggacaaataactgatttttgttcatttgactctgttttaaaattctctttaaaaaaaaaaaaaacaaaaaaaagaaaaagaaagcatatctgaaacttaaaaaaaaaaacaaggaaaaaagatgaaaaaaatgacatacttacataggtgaaaaacacatagatatatctataagcaacaaacacagctaattcaaatataaattaaatatcacattgtcataatgtgtaccgagttaaaaaattatcattcaactcatgatatcaagctttaaaagcaaaaatacaattaactgctctgagaaaacatacccccccagaaaagaaacacaacaacacagaactgaaaataagaagagagattttaatgcataaaatcctgaatacaacataaatatacaatgaaaaataagccctttttgtttttttttgagacagtctcaccctgtcgcccaggctggagtgcagtggtgccatctcggctcactgcaagctccgcctactgggttcacgccattctcctgcctcagcctctcgagtagctgggaatacaggcacccgccactatgcccggctaattttttctatatttagtagagactgggtttcaccgtgttagccaggatggtcttgatctcctgacctcgtgatccacccaccttggcctcccaaagtgctgggattacaggcatgagccaccgtgccgggctgaaaaataaccctttagatatctacagctttaaactgtgtgcagtcatgaaaagcagacattagaagtcattggcatttaataaattgcagtaaaattatacagtaaatacattacaatcattaataataggctttaatgagaagaatttaataaataatcattaaaaagacagcagaattttattctgttctcaatatgttgctgctcttcttatcaaatactataataaaactatatgactataatatagatttcaggagctaaaaaaagccttatattttcaaataaaagaacaatataaattttgcaaaatacaatgagcattactgaagtataaagtaaatatttggaattaaaatatatggtcatttagatacagactaaaaaagaatagaaatcttaatgattcctttctgcctacagtgagcttaaaattacaaccaaaaattttaataaatatgtagcacctacaagaaattttattaacagcttacataatgtgtaaatttgagcaatttattttagaacttttgaatctgaaaatcacctgcttgacattcatttgagaaagtgaaacataaaggagagtaacataagcaagacgacagaatgggaggttctgcatccacatcccccacgacataatgcagctgccacagcaaacataagtgcattcatgaaagccttggaatccagttcagagtttgtgacacccagctggaggcaaagaccaaggaagacatctttagagggtaagcacttgaccaagtggcaagcttgccaatcatggtcctcgcttcaaaacagaatactgccacatcttactgtagacttggctataactcatttgaccttggtcctgacactgcaacagtctgtggaaaacacaagagaattcatactcacctgagacttagatgacaggcctgcagaacttggttctctctatagtccctgaatcaggcaaaacacaccttctttccttctccagccatggtctggaagaaatcttcacattgatatgatgaaatgctaactaacaatatgaaaaatactaaagtataaatgtcactaaaatggtaaatacatactgaatttcagaatactataaattgttatcatcttaaactagactattaaaatacaagatgttttacataagtctcatgataaccagtaggaaaaaaaaatagtaaagaaaaagagaaagtaattaaagcatacacaaacaacaaaaattacacattggatatggtgtctcctgcttataattccaacactttgggaggccaaggtggaagaatcaaatctccttgggtgttgtggtacatgtctgcagtccaagctacttgggtggctaaggtgggacgattatttgagcccaggaggttaaggctacagtgagctgtgatatgccactgcacttcagtctgagcaagaaagcataactttgtctcaacaaaaatgaacaataccacaggaaagacagaaccagaaaaaaaagaagcaaacttaaaatggacagaaaactacaaatgtacaatagtaactgcttacctatcactaccttacaaataaaaagattaaagtatctactaaacagatactgctgtacactgaatgtcatctccaaaatttaggataaaatttaatagccaacatgttagaattaacaggtggaacctttaaaaattaattaagctataagcactctgccctcatgaatggattaacgttcttattatgggaatgggctaattataacaagaatggatctgttatatatttaaaaaaaaaagctctctctccctcacatctttgtgtatgttattatccagcaactagaccttcaacatataccagtataatgttgttttggcttcccagcctccagaatcatgagtcaaataaaattctattctttattaattaccagtgtgtgatattctgttatagcagccaaaagagactaaagcagacagagtggataaattaatcttttaaacctcataatatgctgcttacaagagactcaattatgaattaagagcataggctaaaagtgaaaggatagaaaatgatattccatgcaaataataaccaaaggagtgaaatggtaatgcttaaattagacaaaatagactttctagcaatgtctctcacaagaatgaaatgagtttaccatacaataatagaggttaatttctcaagagaatatagctttatatatttatgcacccaaaagggaggcttctaaatataaaaagcaaatattgccagaactgtagggagaagtagaaagaaacccaataatagaaaactttaacgaaatgtataataaaggacatatagttaacagcattgtaaattggcaagggaaagctggtctcatgtgttgcgtttgagaatgcagcaaagaaagtgggaactgataattttactgcaagcctgagttaggatgaaaaacagggtggtcgattagaggttccacttgccatacattaaaaaaacacaggagaaaaccagtcctcctctggagtgttaaaataattaaagatcagaaaattagtctaaagtggctctagtgccctgtgttcataggtaaaaaacaaaaaacaaacaaaaaaaaatctaaaacctaactcaaatatatttcctataaaacactatcttagcctgaagcaaaatgcaggtttaacccatgacaaacatgcaattaacctctgaatatgtaaccaggacatttccatctggatagttcaaataaggctaccatataactggaaccaattcttgaatttgggttgctttctcatgcatcttatgaaagcctttcctttatgcccctctggtggaccagaaatcatggctgggtgctttccatttcaccaatcactctttgttcagataaactgatgaaccttttaacatagactcccgttaatttttaacacgagagactgtggaccccacgggccgcagctcctcccacgcaaacacccactcgcggtttttccctgatgacccatctggcctccctgaacaatttgggaaatactcatggctgtgggcgcagagcagggcgctgcccagggacaggaccggatgggccggacgggacgtgggggtcctcgctgctggcccagcggccatcttgcagccacaggggactgagggccaagctgcgggagactcggagctaaccgtggggaggccggtcctgccggtttcacagtctgttctcccctctcgggatggcgaaccccgtatactcaccatttcccagcttccaggatgtcctggcaccttaactatgcgtccccaaggacctacagatcgcagggcaacaggggctgtgacagagtagcccagggctctcaaggtgcaggaggcgaaagaggagacagatcccaagctcctgtgccagcaccagcgagagacacagatcccgccaaatgcaggaagccacgccctcctttcctctcctctgccaccgcgcgcctgattgggcggttcccacatcagtgtcaatgactggataaaactccaggacgcacccaccctcgcctgactcctgcccttacccccactccccctcagacttagtgcacttttgttagtttgtttttaagttctggaatacatgtgcagaacgtgcaggtttgttacatagttttacatgtgccatggtggtttgctgcacctatcaacctgccatctaggttttaagccccatatgcattaggtatttgtcctaattttctccctccccttgacctcaaccccttaacaggccttagtgtgtgatctttggctccaggtgtccatgtgttctcatttttcaactcccacatatgagtgagaacatatggtgtttgctttcctgttcccgtgttagtttgctgaggttaatggttcccagcttcatccacgtccctgcaaaggacatgaactcattctttttatggctgcatattatttcatggtgtatatgtgccacattttctttttccaatctatcaatgatgggcattagggttggttccaagtctttgctattgcaaacagtggtgcaatagacatatgagtgcatgtgtctttatgctagaatgatttatattcctttgggtatatacccagtaatgagattgctggatcaaatggtatttctggttctagatccttgaggaatcaccacactgtcttccataatggttgaactaatttacactccctccagcagtgtaaaagtgtttctattcctccacagcctcaccagcatctgttgtttcctaactttttaataactgccattcaacatggtgtgagaaggtatcccattgtggttttgatttgcatttctctagtctccagtgatgatgagcttttctcttttttgtgtttgttgaccacataaaggtccccttcttcttcttcttcttcttcttcttcttcttcttcttcttcttcttcttcttcttcttcttcttttcttcttcttcttcttcttcttcttcttcttctccttctccttcttctttttctatttattttacttattattattatttttaagatggagtcttgctctgtcacccaggctggagtgcagtggaaggatctcggctcactgcaacatctgccacccaggttcaagtgattctcctgccttagcctccccagaagctgggattacaggtcacccgccaacacatcctactaattttttgtgtttttagtagaaatgcggtgtcgccatgcggcccaggctggtcttgaacacctgacctcatgatccacctgcctccacggctgaaagtgctgggattacagacttgatcaaccgcgcccagccaaatatcttcttttgaaaagagtctgtttatattctgtgcccactttttgatggtttttttttgtgtgtgtgtgaatttgtttaagttctttgtagattctggatattagacctctgacacatggatagagtgcaaaaattttctttcactctgtaggttgcctggtcactctggtgatagcttcttttgctgtgcagaagctcgttagtttagttagatctcatttgtcaattttagcttttgttgtgattgcttttggtattttattcatgaagtctttgctcatgcctatgtcctgaatggtattgcctaggttttcttctagggtttttatggtttggtgttttacatttaagactttaatccatcttaagataatgtttgcataaggtgtaaggaaggggtacaatttctgttttctgaatgtggctagccagttctttcagcaccatttggtaagtaggaaatctttccccattgcttgtttttgtcaggtttgtcggagatcagatggttgtagatgtgtgatgttatttctgaggcctctgttctgttccatttgtctatatatctgttttggtatcagtactgtgctgttttggttactgtagccttgtagtatagtttgaagtcgggtagcaggatgcctcaagctttgttgtttttgcttaggattgttttgggttgacaggcaaacaggctcctatatttggggtcacgtgcccagagtatcacagctaattcagacgtgagct
